(19) United States
(12) Patent Application Publication
(10) Pub. No.: US 2018/0371021 A1
(43) Pub. Date: Dec. 27, 2018

(54) PEPTIDOMIMETIC MACROCYCLES AND USES THEREOF

(71) Applicant: Aileron Therapeutics, Inc., Cambridge, MA (US)

(72) Inventors: Manuel AIVADO, Chester Springs, PA (US); Vincent GUERLAVAIS, Arlington, MA (US); Karen OLSON, Waltham, MA (US)

(21) Appl. No.: 15/975,298

(22) Filed: May 9, 2018

Related U.S. Application Data
(60) Provisional application No. 62/650,527, filed on Mar. 30, 2018.
(60) Provisional application No. 62/571,881, filed on Oct. 13, 2017.
(60) Provisional application No. 62/504,922, filed on May 11, 2017.

(51) Int. Cl. C07K 7/64; A61P 35/00; A61K 47/64

(52) U.S. Cl. CPC C07K 7/64; A61P 35/00; A61K 31/519; A61K 2300/00; A61K 47/64

(57) ABSTRACT

The present disclosure describes the synthesis of peptidomimetic macrocycles and methods of using peptidomimetic macrocycles to treat a condition. The present disclosure also describes methods of using peptidomimetic macrocycles in combination with at least one additional pharmaceutically-active agent for the treatment of a condition, for example, cancer.

### CROSS REFERENCE

[0001] This application claims the benefit of U.S. Provisional Application No. 62/504,922, filed May 11, 2017; U.S. Provisional Application No. 62/571,881, filed Oct. 13, 2017; and U.S. Provisional Application No. 62/650,527, filed Mar. 30, 2018, each of which are incorporated herein by reference in their entirety.

### SEQUENCE LISTING

[0002] The instant application contains a Sequence Listing which has been submitted electronically in ASCII format and is hereby incorporated by reference in its entirety. Said ASCII copy, created on May 31, 2018, is named 35224-823_201_SL.txt and is 1,195,677 bytes in size.

### BACKGROUND

[0003] The human transcription factor protein p53 induces cell cycle arrest and apoptosis in response to DNA damage and cellular stress, and thereby plays a critical role in protecting cells from malignant transformation. The E3 ubiquitin ligase MDM2, also known as HDM2, negatively regulates p53 function through a direct binding interaction, which neutralizes the p53 transactivation activity. Loss of p53 activity, either by deletion, mutation, or MDM2 overexpression, is the most common defect in human cancers.

### INCORPORATION BY REFERENCE

[0004] All publications, patents, and patent applications mentioned in this specification are herein incorporated by reference to the same extent as if each individual publication, patent, or patent application was specifically and individually indicated to be incorporated by reference.

### SUMMARY OF THE INVENTION

[0005] In some embodiments, the present disclosure provides a method of treating a condition in a subject in need thereof, the method comprising administering to the subject a therapeutically-effective amount of a peptidomimetic macrocycle and at least one pharmaceutically-active agent, wherein the peptidomimetic macrocycle and the at least one pharmaceutically-active agent are administered with a time separation of more than 61 minutes.

### BRIEF DESCRIPTION OF THE FIGURES

[0006] FIG. 1 shows that treatment with SP262 and SP154 resulted in decreased PD-L1 expression in HCT-116 p53^{+/+} cells, but not HCT-116 p53^{-/-} cells.

[0007] FIG. 2 illustrates the dosing regiments (DRs) used in the “3+3” dose escalation trial.

[0008] FIG. 3 shows drug concentration levels in patient plasma at all dose levels tested in Arm A (LEFT PANEL) and Arm B (RIGHT PANEL).

[0009] FIG. 4 shows fold-increase levels from baseline levels of plasma MIC-1 on cycle one, day one, two, or three (C1D1, C1D2, C1D3) at dose levels at or above 0.83 mg/kg.

[0010] FIG. 5 shows a waterfall plot that illustrates the anti-tumor activity of AP1 in patients of the Phase 1 dose-escalation trial.

[0011] FIG. 6 shows results of the anti-tumor activity study for 33 patients.

[0012] FIG. 7 shows the time-on-drug for evaluable p53-WT patients who had CRs, PRs, and SDs when dosed with AP1 at ≥3.2 mg/kg/cycle.

[0013] FIG. 8 PANEL A shows a 50-year-old patient with peripheral T-Cell Lymphoma (PTCL). FIG. 8 PANEL B shows that the lymph node returned to its normal size and was no longer detected by the PET tracer as being cancerous after six cycles of AP1 treatment. FIG. 8 PANEL C shows images of a 73-year-old patient with Merkel Cell Carcinoma (MCC). FIG. 8 PANEL D shows that skin lesions diminished in size and left only mild scar tissue after one cycle of AP1 treatment.

[0014] FIG. 9 LEFT PANEL shows PET scans from the first patient enrolled in the Phase 2 study prior to treatment with AP1. FIG. 9 RIGHT PANEL shows PET scans from the first patient enrolled in the Phase 2 study after 2 cycles of treatment with AP1.

[0015] FIG. 10 TOP PANEL shows percentage of human CD45 engraftment in bone marrow for the vehicle, and treatment with 20 mg/kg AP1. FIG. 10 BOTTOM PANEL shows the percentage survival of mice upon treatment with the vehicle or administration of AP1.

[0016] FIG. 11 shows a graph of MCF-7 cell proliferation determined using a WST-1 assay measured at the indicated time points after different numbers of MCF-7 cells were grown at 37° C. for a 24 hour growth period.

[0017] FIG. 12 shows MCF-7 cell proliferation when the cells were treated with varying concentrations of ribociclib.

[0018] FIG. 13 shows MCF-7 cell proliferation when the cells were treated with AP1 or AP1 with varying concentrations of ribociclib.

[0019] FIG. 14 shows MCF-7 cell proliferation when the cells were treated with varying concentrations of AP1. MCF-7 cells were treated with ribociclib or a combination of ribociclib and AP1 at concentrations of 0.1 μM, 0.3 μM, and 1 μM.

[0020] FIG. 15 shows MCF-7 cell proliferation when the cells were treated with ribociclib or ribociclib with varying concentrations of AP1.

[0021] FIG. 16 shows a combination index plot of ribociclib in MCF-7 cells.

[0022] FIG. 17 shows MCF-7 cell proliferation when the cells were treated with varying concentrations of abemaciclib.

[0023] FIG. 18 shows MCF-7 cell proliferation when the cells were treated with AP1 or AP1 with varying concentrations of abemaciclib.

[0024] FIG. 19 shows MCF-7 cell proliferation when the cells were treated with varying concentrations of AP1.

[0025] FIG. 20 shows MCF-7 cell proliferation when the cells were treated with abemaciclib or abemaciclib with varying concentrations of AP1.

[0026] FIG. 21 shows cell proliferation of MCF-7 cells when the cells were treated with palbociclib alone.

[0027] FIG. 22 shows cell proliferation of MCF-7 cells when the cells were treated with AP1 alone.

[0028] FIG. 23 shows MCF-7 cell proliferation when the cells were treated simultaneously with a fixed amount of AP1 and varying amounts of palbociclib.

[0029] FIG. 24 shows MCF-7 cell proliferation when the cells were treated simultaneously with a fixed amount of palbociclib and varying amounts of AP1.

[0030] FIG. 25 shows MCF-7 cell proliferation when the cells were treated with varying concentrations of AP1 and palbociclib in different orders over a period of 72 h.

[0031] FIG. 26 shows MCF-7 cell proliferation when the cells were pre-treated with AP1 for 24 h and subsequently treated with varying concentrations of palbociclib; and when the cells were pre-treated with varying concentrations of palbociclib for 24 h and subsequently treated with a fixed amount of AP1.

[0032] FIG. 27 shows MCF-7 cell proliferation when the cells were pre-treated with varying concentrations of AP1 for 24 h and subsequently treated with fixed amounts of palbociclib; and when the cells were pre-treated with fixed amounts of palbociclib and subsequently treated with varying concentrations of AP1.

[0033] FIG. 28 shows MOLT-3 cell proliferation when the cells were treated with palbociclib alone.

[0034] FIG. 29 shows MOLT-3 cell proliferation when the cells were treated with AP1 alone.

[0035] FIG. 30 shows the combination index plot of the treatment of MCF-7 cells with AP1 and palbociclib using a WST-1 assay.

[0036] FIG. 31 shows the combination index plot of the treatment of MCF-7 cells with AP1 and palbociclib using CyQUANT.

[0037] FIG. 32 shows the effects of AP1, palbociclib, or combination treatment with AP1+palbociclib on the median tumor volumes in the SJSA-1 osteosarcoma xenograft model.

[0038] FIG. 33 shows the effects of AP1, palbociclib, or combination treatment with AP1+palbociclib on the median tumor volumes in the MCF-7.1 human breast carcinoma xenograft model.

[0039] FIG. 34 shows individual tumor volumes of mice treated with MCF-7.1 human breast carcinoma xenografts treated with the vehicle.

[0040] FIG. 35 PANEL A shows the individual tumor volumes of mice treated with AP1 20 mg/kg qwk×4. FIG. 35 PANEL B shows the individual tumor volumes of mice treated with palbociclib 75 mg/kg qd×22. FIG. 35 PANEL C shows the individual tumor volumes of mice treated with AP1, and treated with palbociclib 6 h after administration of AP1. FIG. 35 PANEL D shows the individual tumor volumes of mice treated with palbociclib, and treated with AP1 6 h after administration of AP1.

[0041] FIG. 36 shows the effects of AP1, palbociclib, or combination treatment with AP1+palbociclib on the median tumor volumes in the A549 xenograft model.

[0042] FIG. 37 PANEL A shows the effect of vehicle treatment on median tumor volumes in the A549 xenograft model. FIG. 37 PANEL B shows the effect of vehicle treatment on median tumor volumes in the A549 xenograft model.

[0043] FIG. 38 shows C32 cell proliferation when the cells were treated with trametinib alone or trametinib in combination with varying concentrations of AP1.

[0044] FIG. 39 shows the combination index plot of the treatment of C32 cells with AP1 and trametinib.

[0045] FIG. 40 shows C32 cell proliferation when the cells were treated with AP1 alone or AP1 with varying concentrations of trametinib.

[0046] FIG. 41 shows C32 cell proliferation when the cells were treated with varying concentrations of AP1 and varying concentrations of trametinib.

[0047] FIG. 42 shows MEL-JUSO cell proliferation when the cells were treated with AP1 alone or AP1 and varying concentrations of trametinib.

[0048] FIG. 43 shows MEL-JUSO cell proliferation when the cells were treated with no agent, AP1 alone, trametinib alone, or 0.03 μM AP1 and 1.0 nM trametinib.

[0049] FIG. 44 shows MEL-JUSO cell proliferation when the cells were treated with trametinib alone or trametinib with varying concentrations of AP1

[0050] FIG. 45 shows the combination index plot of the treatment of MEL-JUSO cells with AP1 and trametinib.

[0051] FIG. 46 shows A375 cell proliferation when the cells were treated with AP1 alone or AP1 in combination with varying concentrations of trametinib.

[0052] FIG. 47 shows A375 cell proliferation when the cells were treated with trametinib alone or trametinib in combination with varying concentrations of AP1.

[0053] FIG. 48 shows the combination index plot of the treatment of A375 melanoma cells with AP1 and trametinib.

[0054] FIG. 49 shows C32 cell proliferation when the cells were treated with varying concentrations of binimetinib and AP1.

[0055] FIG. 50 shows C32 cell proliferation when the cells were treated with AP1 alone or AP1 in combination with varying concentrations of binimetinib.

[0056] FIG. 51 shows C32 cell proliferation when the cells were treated with binimetinib alone or binimetinib in combination with varying concentrations of AP1.

[0057] FIG. 52 shows the combination index plot of the treatment of C32 cells with AP1 and binimetinib.

[0058] FIG. 53 shows MEL-JUSO cell proliferation when the cells were treated with AP1 alone or AP1 in combination with varying concentrations of binimetinib.

[0059] FIG. 54 shows MEL-JUSO cell proliferation when the cells were treated with AP1 alone or AP1 in combination with varying concentrations of binimetinib.

[0060] FIG. 55 shows MEL-JUSO cell proliferation when the cells were treated with binimetinib alone or binimetinib in combination with varying concentrations of AP1.

[0061] FIG. 56 shows the combination index plot of the treatment of MEL-JUSO cells with AP1 and binimetinib.

[0062] FIG. 57 shows C32 cell proliferation when the cells were treated with AP1 alone or AP1 in combination with varying combinations of pimasertib.

[0063] FIG. 58 shows C32 cell proliferation when the cells were treated with varying concentrations of AP1 and pimasertib.

[0064] FIG. 59 shows C32 cell proliferation when the cells were treated with pimasertib alone or pimasertib in combination with varying concentrations of AP1.

[0065] FIG. 60 shows the combination index plot of the treatment of C32 cells with AP1 and pimasertib.

[0066] FIG. 61 shows MEL-JUSO cell proliferation when the cells were treated with AP1 alone or AP1 in combination with varying concentrations of pimasertib.

[0067] FIG. 62 shows MEL-JUSO cell proliferation when the cells were treated with AP1 and pimasertib.

[0068] FIG. 63 shows MEL-JUSO cell proliferation when the cells were treated with pimasertib alone or pimasertib in combination with varying concentrations of AP1.

[0069] FIG. 64 shows the combination index plot of the treatment of MEL-JUSO cells with AP1 and pimasertib.

[0070] FIG. 65 shows C32 cell proliferation when the cells were treated with AP1 alone or AP1 in combination with varying combinations of selumetinib.

[0071] FIG. 66 shows C32 cell proliferation when the cells were treated with varying concentrations of AP1 and selumetinib.

[0072] FIG. 67 shows C32 cell proliferation when the cells were treated with selumetinib alone or selumetinib in combination with varying concentrations of AP1.

[0073] FIG. 68 shows the combination index plot of the treatment of C32 cells with AP1 and selumetinib.

[0074] FIG. 69 shows MEL-JUSO cell proliferation when the cells were treated with AP1 alone or AP1 in combination with varying concentrations of pimasertib.

[0075] FIG. 70 shows MEL-JUSO cell proliferation when the cells were treated with AP1 and pimasertib.

[0076] FIG. 71 shows MEL-JUSO cell proliferation when the cells were treated with pimasertib alone or pimasertib in combination with varying concentrations of AP1.

[0077] FIG. 72 shows the combination index plot of the treatment of MEL-JUSO cells with AP1 and pimasertib.

[0078] FIG. 73 shows combination treatment and dosing regimens used to study the effects of AP1 to treat AML.

[0079] FIG. 74 shows the results of treatment with AP1 or Paclitaxel on individual mouse tumor volume by day.

[0080] FIG. 75 shows the results of combination treatment with AP1+paclitaxel on individual mouse tumor volume by day.

[0081] FIG. 76 shows the results of treatment with AP1 or Paclitaxel on individual mouse tumor volume by day on a Log₁₀ axis to show growth.

[0082] FIG. 77 shows the results of combination treatment with AP1+paclitaxel on individual mouse tumor volume by day on a Log₁₀ axis to show growth.

[0083] FIG. 78 shows the results of treatment with AP1 or Paclitaxel on individual mouse tumor volume % change from baseline by day.

[0084] FIG. 79 shows the results of combination treatment with AP1+paclitaxel on individual mouse tumor volume % change from baseline by day.

[0085] FIG. 80 shows the results of treatment with AP1 or Paclitaxel on median tumor volume % change from baseline by day.

[0086] FIG. 81 shows the results of combination treatment with AP1+paclitaxel on median tumor volume % change from baseline by day.

[0087] FIG. 82 shows the results of treatment with AP1 or Paclitaxel on average (±1 StDev) tumor volume % change from baseline by day.

[0088] FIG. 83 shows the results of combination treatment with AP1+paclitaxel on average (±1 StDev) tumor volume % change from baseline by day.

[0089] FIG. 84 compares the results of treatment with AP1, paclitaxel, or combination treatment with AP1+paclitaxel on the average % change in tumor volume from baseline per day.

[0090] FIG. 85 compares the results of treatment with AP1, paclitaxel, or combination treatment with AP1+paclitaxel on the average % change in tumor volume from baseline per day.

[0091] FIG. 86 shows the effect of treatment with AP1, paclitaxel, or combination treatment with AP1+paclitaxel on individual tumor volume % change from baseline on Day 28 per study group.

[0092] FIG. 87 shows the effect of treatment with AP1, eribulin, or combination treatment with AP1+eribulin on the average % change of tumor volume.

[0093] FIG. 88 shows the effect of treatment with AP1, eribulin, or combination treatment with AP1+eribulin on individual tumor volume % change from baseline on Day 28

[0094] FIG. 89 shows changes in the normalized body weights of mice treated under various dosing regimens of AP1, Abraxane®, or combination treatment with AP1+Abraxane® over a period of 12 days in the MCF-7.1 human breast carcinoma xenograft model.

[0095] FIG. 90 shows changes in tumor volumes (mm³) of mice treated under various dosing regimens over a period of 12 days in the MCF-7.1 human breast carcinoma xenograft model.

[0096] FIG. 91 PANEL A shows the results of vehicle treatment on tumor volumes (mm³) of mice using a CloudmanS91 malignant melanoma model. FIG. 91 PANEL B shows the results of treatment with anti-PD-1 on tumor volumes (mm³) of mice using a CloudmanS91 malignant melanoma model. FIG. 91 PANEL C shows the effect of treatment with twice a week treatment of AP1 at 20 mg/kg on tumor volumes (mm³) of mice using a CloudmanS91 malignant melanoma model. FIG. 91 PANEL D shows the effect of combination treatment with twice a week treatment of AP1 at 20 mg/kg and anti-PD-1 on tumor volumes (mm³) of mice using a CloudmanS91 malignant melanoma model.

[0097] FIG. 92 PANEL A shows the results of vehicle treatment on tumor volumes (mm³) of mice using a CloudmanS91 malignant melanoma model. FIG. 92 PANEL B shows the results of treatment with anti-PD-L1 on tumor volumes (mm³) of mice using a CloudmanS91 malignant melanoma model. FIG. 92 PANEL C shows the effect of treatment with twice a week treatment of AP1 at 20 mg/kg on tumor volumes (mm³) of mice using a CloudmanS91 malignant melanoma model. FIG. 92 PANEL D shows the effect of combination treatment with twice a week treatment of AP1 at 20 mg/kg and anti-PD-L1 on tumor volumes (mm³) of mice using a CloudmanS91 malignant melanoma model.

[0098] FIG. 93 PANEL A shows the results of vehicle treatment on tumor volumes (mm³) of mice using the A20 murine lymphoma model. FIG. 93 PANEL B shows the results of treatment with anti-PD-1 on tumor volumes (mm³) of mice using the A20 murine lymphoma model. FIG. 93 PANEL C shows the effect of treatment with twice a week treatment of AP1 at 20 mg/kg on tumor volumes (mm³) of mice using the A20 murine lymphoma model. FIG. 93 PANEL D shows the effect of combination treatment with twice a week treatment of AP1 at 20 mg/kg and anti-PD-1 on tumor volumes (mm³) of mice using the A20 murine lymphoma model.

[0099] FIG. 94 PANEL A shows the results of vehicle treatment on tumor volumes (mm³) of mice using the A20 murine lymphoma model. FIG. 94 PANEL B shows the results of treatment with anti-PD-L1 on tumor volumes (mm³) of mice using the A20 murine lymphoma model. FIG. 94 PANEL C shows the effect of treatment with twice a week treatment of AP1 at 20 mg/kg on tumor volumes (mm³) of mice using the A20 murine lymphoma model. FIG. 94 PANEL D shows the effect of combination treatment with twice a week treatment of AP1 at 20 mg/kg and anti-PD-L1 on tumor volumes (mm³) of mice using the A20 murine lymphoma model.

[0100] FIG. 95 PANEL A shows the results of vehicle treatment on tumor volumes (mm³) of mice using the M38 syngeneic colon carcinoma model. FIG. 95 PANEL B shows the results of treatment with anti-PD-L1 on tumor volumes (mm³) of mice using the M38 syngeneic colon carcinoma model. FIG. 95 PANEL C shows the effect of treatment with twice a week treatment of AP1 at 20 mg/kg on tumor volumes (mm³) of mice using the M38 syngeneic colon carcinoma model. FIG. 95 PANEL D shows the effect of combination treatment with twice a week treatment of AP1 at 20 mg/kg and anti-PD-L1 on tumor volumes (mm³) of mice using the M38 syngeneic colon carcinoma model.

[0101] FIG. 96 PANEL A shows the results of vehicle treatment on tumor volumes (mm³) of mice using the M38 syngeneic colon carcinoma model. FIG. 96 PANEL B shows the results of treatment with anti-PD-L1 on tumor volumes (mm³) of mice using the M38 syngeneic colon carcinoma model. FIG. 96 PANEL C shows the effect of treatment with twice a week treatment of AP1 at 20 mg/kg on tumor volumes (mm³) of mice using the M38 syngeneic colon carcinoma model. FIG. 96 PANEL D shows the effect of combination treatment with twice a week treatment of AP1 at 20 mg/kg and anti-PD-L1 on tumor volumes (mm³) of mice using the M38 syngeneic colon carcinoma model.

[0102] FIG. 97 PANEL A shows the results of vehicle treatment on tumor volumes (mm³) of mice using the CT26 undifferentiated colon carcinoma cell line. FIG. 97 PANEL B shows the results of treatment with anti-CTLA-4 9H10 on tumor volumes (mm³) of mice using the CT26 undifferentiated colon carcinoma cell line. FIG. 97 PANEL C shows the effect of treatment with twice a week treatment of AP1 at 20 mg/kg on tumor volumes (mm³) of mice using the CT26 undifferentiated colon carcinoma cell line. FIG. 97 PANEL D shows the effect of combination treatment with twice a week treatment of AP1 at 20 mg/kg and anti-CTLA-4 on tumor volumes (mm³) of mice using the CT26 undifferentiated colon carcinoma cell line.

### DETAILED DESCRIPTION

[0103] The human transcription factor protein p53 induces cell cycle arrest and apoptosis in response to DNA damage and cellular stress, and thereby plays a critical role in protecting cells from malignant transformation. The E3 ubiquitin ligase MDM2, also known as HDM2, negatively regulates p53 function through a direct binding interaction that neutralizes the p53 transactivation activity. Neutralization of p53 transactivation activity leads to export from the nucleus of p53 protein, which targets p53 for degradation via the ubiquitylation-proteasomal pathway. Loss of p53 activity, either by deletion, mutation, or MDM2 overexpression, is the most common defect in human cancers. Tumors that express wild type p53 are vulnerable to pharmacologic agents that stabilize or increase the concentration of active p53.

[0104] MDMX (MDM4) is a negative regulator of p53, and there is significant structural homology between the p53 binding interfaces of MDM2 and MDMX. The p53-MDM2 and p53-MDMX protein-protein interactions are mediated by the same 15-residue alpha-helical transactivation domain of p53, which inserts into hydrophobic clefts on the surface of MDM2 and MDMX. Three residues within this domain of p53 (F19, W23, and L26) are essential for binding to MDM2 and MDMX.

[0105] Provided herein are p53-based peptidomimetic macrocycles that modulate an activity of p53 and p53-based peptidomimetic macrocycles that inhibit the interactions between p53 and MDM2 and/or p53 and MDMX proteins. Also provided herein are the use of p53-based peptidomimetic macrocycles and an additional therapeutic agent for the treatment of a condition. Further, provided herein are p53-based peptidomimetic macrocycles and additional therapeutic agents that can be used for treating diseases, for example, cancer and other hyperproliferative diseases.

### Definitions

[0106] As used herein, the term “macrocycle” refers to a molecule having a chemical structure including a ring or cycle formed by at least 9 covalently bonded atoms.

[0107] As used herein, the term “peptidomimetic macrocycle” or “crosslinked polypeptide” refers to a compound comprising a plurality of amino acid residues joined by a plurality of peptide bonds and at least one macrocycle-forming linker which forms a macrocycle between a first naturally-occurring or non-naturally-occurring amino acid residue (or analogue) and a second naturally-occurring or non-naturally-occurring amino acid residue (or analogue) within the same molecule. Peptidomimetic macrocycle include embodiments where the macrocycle-forming linker connects the α-carbon of the first amino acid residue (or analogue) to the α-carbon of the second amino acid residue (or analogue). The peptidomimetic macrocycles optionally include one or more non-peptide bonds between one or more amino acid residues and/or amino acid analogue residues, and optionally include one or more non-naturally-occurring amino acid residues or amino acid analogue residues in addition to any which form the macrocycle. A “corresponding uncrosslinked polypeptide” when referred to in the context of a peptidomimetic macrocycle is understood to relate to a polypeptide of the same length as the macrocycle and comprising the equivalent natural amino acids of the wild-type sequence corresponding to the macrocycle.

[0108] AP1 is an alpha helical hydrocarbon crosslinked polypeptide macrocycle with an amino acid sequence less than 20 amino acids long that is derived from the transactivation domain of wild type human p53 protein. AP1 contains a phenylalanine, a tryptophan and a leucine amino acid in the same positions relative to each other as in the transactivation domain of wild type human p53 protein. AP1 has a single cross link spanning amino acids in the i to the i+7 position of the amino acid sequence and has more than three amino acids between the i+7 position and the carboxyl terminus. AP1 binds to human MDM2 and MDM4 and has an observed mass of 950-975 m/e as measured by electrospray ionization-mass spectrometry.

[0109] As used herein, the term “stability” refers to the maintenance of a defined secondary structure in solution by a peptidomimetic macrocycle as measured by circular dichroism, NMR or another biophysical measure, or resistance to proteolytic degradation in vitro or in vivo. Non-limiting examples of secondary structures contemplated herein are α-helices, 3₁₀ helices, β-turns, and β-pleated sheets.

[0110] As used herein, the term “helical stability” refers to the maintenance of an α-helical structure by a peptidomimetic macrocycle as measured by circular dichroism or NMR. In some embodiments, a peptidomimetic macrocycle can exhibit at least a 1.25, 1.5, 1.75, or 2-fold increase in α-helicity as determined by circular dichroism compared to a corresponding uncrosslinked macrocycle.

[0111] The term “amino acid” refers to a molecule containing both an amino group and a carboxyl group. Suitable amino acids include, without limitation, both the D- and L-isomers of the naturally-occurring amino acids, as well as non-naturally-occurring amino acids prepared by organic synthesis or other metabolic routes. The term amino acid, as used herein, includes, without limitation, α-amino acids, natural amino acids, non-natural amino acids, and amino acid analogues.

[0112] The term “α-amino acid” refers to a molecule containing both an amino group and a carboxyl group bound to a carbon which is designated the α-carbon.

[0113] The term “β-amino acid” refers to a molecule containing both an amino group and a carboxyl group in a β configuration.

[0114] The term “naturally-occurring amino acid” refers to any one of the twenty amino acids commonly found in peptides synthesized in nature, and known by the one letter abbreviations A, R, N, C, D, Q, E, G, H, I, L, K, M, F, P, S, T, W, Y and V.

[0115] The following table shows a summary of the properties of natural amino acids:

| | 3- | 1- | Side- | Side-chain | |
|---|---|---|---|---|---|
| | Letter | Letter | chain | charge | Hydropathy |
| Amino Acid | Code | Code | Polarity | (pH 7.4) | Index |
| Alanine | Ala | A | nonpolar | neutral | 1.8 |
| Arginine | Arg | R | polar | positive | −4.5 |
| Asparagine | Asn | N | polar | neutral | −3.5 |
| Aspartic acid | Asp | D | polar | negative | −3.5 |
| Cysteine | Cys | C | polar | neutral | 2.5 |
| Glutamic acid | Glu | E | polar | negative | −3.5 |
| Glutamine | Gln | Q | polar | neutral | −3.5 |
| Glycine | Gly | G | nonpolar | neutral | −0.4 |
| Histidine | His | H | polar | Positive (10%) | −3.2 |
| | | | | Neutral (90%) | |
| Isoleucine | Ile | I | nonpolar | neutral | 4.5 |
| Leucine | Leu | L | nonpolar | neutral | 3.8 |
| Lysine | Lys | K | polar | positive | −3.9 |
| Methionine | Met | M | nonpolar | neutral | 1.9 |
| Phenylalanine | Phe | F | nonpolar | neutral | 2.8 |
| Proline | Pro | P | nonpolar | neutral | −1.6 |
| Serine | Ser | S | polar | neutral | −0.8 |
| Threonine | Thr | T | polar | neutral | −0.7 |
| Tryptophan | Trp | W | nonpolar | neutral | −0.9 |
| Tyrosine | Tyr | Y | polar | neutral | −1.3 |
| Valine | Val | V | nonpolar | neutral | 4.2 |

[0116] “Hydrophobic amino acids” include small hydrophobic amino acids and large hydrophobic amino acids. “Small hydrophobic amino acids” are glycine, alanine, proline, and analogues thereof. “Large hydrophobic amino acids” are valine, leucine, isoleucine, phenylalanine, methionine, tryptophan, and analogues thereof. “Polar amino acids” are serine, threonine, asparagine, glutamine, cysteine, tyrosine, and analogues thereof. “Charged amino acids” are lysine, arginine, histidine, aspartate, glutamate, and analogues thereof.

[0117] The term “amino acid analogue” refers to a molecule which is structurally similar to an amino acid and which can be substituted for an amino acid in the formation of a peptidomimetic macrocycle. Amino acid analogues include, without limitation, β-amino acids and amino acids wherein the amino or carboxy group is substituted by a similarly reactive group (e.g., substitution of the primary amine with a secondary or tertiary amine, or substitution of the carboxy group with an ester).

[0118] The term “non-natural amino acid” refers to an amino acid which is not one of the twenty amino acids commonly found in peptides synthesized in nature, and known by the one letter abbreviations A, R, N, C, D, Q, E, G, H, I, L, K, M, F, P, S, T, W, Y and V. Non-natural amino acids or amino acid analogues include, without limitation, structures according to the following:

[chemical structure]

[chemical structure]

[chemical structure]

[chemical structure]

[chemical structure]

[chemical structure]

[chemical structure]

[chemical structure]

[chemical structure]

[chemical structure]

[chemical structure]

[0119] Amino acid analogues include β-amino acid analogues. Examples of β-amino acid analogues include, but are not limited to, the following: cyclic β-amino acid analogues; β-alanine; (R)-β-phenylalanine; (R)-1,2,3,4-tetrahydro-isoquinoline-3-acetic acid; (R)-3-amino-4-(1-naphthyl)-butyric acid; (R)-3-amino-4-(2,4-dichlorophenyl)butyric acid; (R)-3-amino-4-(2-chlorophenyl)-butyric acid; (R)-3-amino-4-(2-cyanophenyl)-butyric acid; (R)-3-amino-4-(2-fluorophenyl)-butyric acid; (R)-3-amino-4-(2-furyl)-butyric acid; (R)-3-amino-4-(2-methylphenyl)-butyric acid; (R)-3-amino-4-(2-naphthyl)-butyric acid; (R)-3-amino-4-(2-thienyl)-butyric acid; (R)-3-amino-4-(2-trifluoromethylphenyl)-butyric acid; (R)-3-amino-4-(3,4-dichlorophenyl)butyric acid; (R)-3-amino-4-(3,4-difluorophenyl)butyric acid; (R)-3-amino-4-(3-benzothienyl)-butyric acid; (R)-3-amino-4-(3-chlorophenyl)-butyric acid; (R)-3-amino-4-(3-cyanophenyl)-butyric acid; (R)-3-amino-4-(3-fluorophenyl)-butyric acid; (R)-3-amino-4-(3-methylphenyl)-butyric acid; (R)-3-amino-4-(3-pyridyl)-butyric acid; (R)-3-amino-4-(3-thienyl)-butyric acid; (R)-3-amino-4-(3-trifluoromethylphenyl)-butyric acid; (R)-3-amino-4-(4-bromophenyl)-butyric acid; (R)-3-amino-4-(4-chlorophenyl)-butyric acid; (R)-3-amino-4-(4-cyanophenyl)-butyric acid; (R)-3-amino-4-(4-fluorophenyl)-butyric acid; (R)-3-amino-4-(4-iodophenyl)-butyric acid; (R)-3-amino-4-(4-methylphenyl)-butyric acid; (R)-3-amino-4-(4-nitrophenyl)-butyric acid; (R)-3-amino-4-(4-pyridyl)-butyric acid; (R)-3-amino-4-(4-trifluoromethylphenyl)-butyric acid; (R)-3-amino-4-pentafluoro-phenylbutyric acid; (R)-3-amino-5-hexenoic acid; (R)-3-amino-5-hexynoic acid; (R)-3-amino-5-phenylpentanoic acid; (R)-3-amino-6-phenyl-5-hexenoic acid; (S)-1,2,3,4-tetrahydro-isoquinoline-3-acetic acid; (S)-3-amino-4-(1-naphthyl)-butyric acid; (S)-3-amino-4-(2,4-dichlorophenyl)butyric acid; (S)-3-amino-4-(2-chlorophenyl)-butyric acid; (S)-3-amino-4-(2-cyanophenyl)-butyric acid; (S)-3-amino-4-(2-fluorophenyl)-butyric acid; (S)-3-amino-4-(2-furyl)-butyric acid; (S)-3-amino-4-(2-methylphenyl)-butyric acid; (S)-3-amino-4-(2-naphthyl)-butyric acid; (S)-3-amino-4-(2-thienyl)-butyric acid; (S)-3-amino-4-(2-trifluoromethylphenyl)-butyric acid; (S)-3-amino-4-(3,4-dichlorophenyl)butyric acid; (S)-3-amino-4-(3,4-difluorophenyl)butyric acid; (S)-3-amino-4-(3-benzothienyl)-butyric acid; (S)-3-amino-4-(3-chlorophenyl)-butyric acid; (S)-3-amino-4-(3-cyanophenyl)-butyric acid; (S)-3-amino-4-(3-fluorophenyl)-butyric acid; (S)-3-amino-4-(3-methylphenyl)-butyric acid; (S)-3-amino-4-(3-pyridyl)-butyric acid; (S)-3-amino-4-(3-thienyl)-butyric acid; (S)-3-amino-4-(3-trifluoromethylphenyl)-butyric acid; (S)-3-amino-4-(4-bromophenyl)-butyric acid; (S)-3-amino-4-(4-chlorophenyl)-butyric acid; (S)-3-amino-4-(4-cyanophenyl)-butyric acid; (S)-3-amino-4-(4-fluorophenyl)-butyric acid; (S)-3-amino-4-(4-iodophenyl)-butyric acid; (S)-3-amino-4-(4-methylphenyl)-butyric acid; (S)-3-amino-4-(4-nitrophenyl)-butyric acid; (S)-3-amino-4-(4-pyridyl)-butyric acid; (S)-3-amino-4-(4-trifluoromethylphenyl)-butyric acid; (S)-3-amino-4-pentafluoro-phenylbutyric acid; (S)-3-amino-5-hexenoic acid; (S)-3-amino-5-hexynoic acid; (S)-3-amino-5-phenylpentanoic acid; (S)-3-amino-6-phenyl-5-hexenoic acid; 1,2,5,6-tetrahydropyridine-3-carboxylic acid; 1,2,5,6-tetrahydropyridine-4-carboxylic acid; 3-amino-3-(2-chlorophenyl)-propionic acid; 3-amino-3-(2-thienyl)-propionic acid; 3-amino-3-(3-bromophenyl)-propionic acid; 3-amino-3-(4-chlorophenyl)-propionic acid; 3-amino-3-(4-methoxyphenyl)-propionic acid; 3-amino-4,4,4-trifluoro-butyric acid; 3-aminoadipic acid; D-β-phenylalanine; β-leucine; L-β-homoalanine; L-β-homoaspartic acid γ-benzyl ester; L-β-homoglutamic acid δ-benzyl ester; L-β-homoisoleucine; L-β-homoleucine; L-β-homomethionine; L-β-homophenylalanine; L-β-homoproline; L-β-homotryptophan; L-β-homovaline; L-Nω-benzyloxycarbonyl-β-homolysine; Nω-L-β-homoarginine; O-benzyl-L-β-homohydroxyproline; O-benzyl-L-β-homoserine; O-benzyl-L-β-homothreonine; O-benzyl-L-β-homotyrosine; γ-trityl-L-β-homoasparagine; (R)-β-phenylalanine; L-β-homoaspartic acid γ-t-butyl ester; L-β-homoglutamic acid δ-t-butyl ester; L-Nω-β-homolysine; Nδ-trityl-L-β-homoglutamine; Nω-2,2,4,6,7-pentamethyl-dihydrobenzofuran-5-sulfonyl-L-β-homoarginine; O-t-butyl-L-β-homohydroxy-proline; O-t-butyl-L-β-homoserine; O-t-butyl-L-β-homothreonine; O-t-butyl-L-β-homotyrosine; 2-aminocyclopentane carboxylic acid; and 2-aminocyclohexane carboxylic acid.

[0120] Amino acid analogues include analogues of alanine, valine, glycine or leucine. Examples of amino acid analogues of alanine, valine, glycine, and leucine include, but are not limited to, the following: α-methoxyglycine; α-allyl-L-alanine; α-aminoisobutyric acid; α-methyl-leucine; β-(1-naphthyl)-D-alanine; β-(1-naphthyl)-L-alanine; β-(2-naphthyl)-D-alanine; β-(2-naphthyl)-L-alanine; β-(2-pyridyl)-D-alanine; β-(2-pyridyl)-L-alanine; β-(2-thienyl)-D-alanine; β-(2-thienyl)-L-alanine; β-(3-benzothienyl)-D-alanine; β-(3-benzothienyl)-L-alanine; β-(3-pyridyl)-D-alanine; β-(3-pyridyl)-L-alanine; β-(4-pyridyl)-D-alanine; β-(4-pyridyl)-L-alanine; β-chloro-L-alanine; β-cyano-L-alanine; β-cyclohexyl-D-alanine; β-cyclohexyl-L-alanine; β-cyclopenten-1-yl-alanine; β-cyclopentyl-alanine; β-cyclopropyl-L-Ala-OH.dicyclohexylammonium salt; β-t-butyl-D-alanine; β-t-butyl-L-alanine; γ-aminobutyric acid; L-α,β-diaminopropionic acid; 2,4-dinitro-phenylglycine; 2,5-dihydro-D-phenylglycine; 2-amino-4,4,4-trifluorobutyric acid; 2-fluoro-phenylglycine; 3-amino-4,4,4-trifluoro-butyric acid; 3-fluoro-valine; 4,4,4-trifluoro-valine; 4,5-dehydro-L-leu-OH.dicyclohexylammonium salt; 4-fluoro-D-phenylglycine; 4-fluoro-L-phenylglycine; 4-hydroxy-D-phenylglycine; 5,5,5-trifluoro-leucine; 6-aminohexanoic acid; cyclopentyl-D-Gly-OH.dicyclohexylammonium salt; cyclopentyl-Gly-OH.dicyclohexylammonium salt; D-α,β-diaminopropionic acid; D-α-aminobutyric acid; D-α-t-butylglycine; D-(2-thienyl)glycine; D-(3-thienyl)glycine; D-2-aminocaproic acid; D-2-indanylglycine; D-allylglycine.dicyclohexylammonium salt; D-cyclohexylglycine; D-norvaline; D-phenylglycine; β-aminobutyric acid; β-aminoisobutyric acid; (2-bromophenyl)glycine; (2-methoxyphenyl)glycine; (2-methylphenyl)glycine; (2-thiazoyl)glycine; (2-thienyl)glycine; 2-amino-3-(dimethylamino)-propionic acid; L-α,β-diaminopropionic acid; L-α-aminobutyric acid; L-α-t-butylglycine; L-(3-thienyl)glycine; L-2-amino-3-(dimethylamino)-propionic acid; L-2-aminocaproic acid dicyclohexyl-ammonium salt; L-2-indanylglycine; L-allylglycine.dicyclohexyl ammonium salt; L-cyclohexylglycine; L-phenylglycine; L-propargylglycine; L-norvaline; N-α-aminomethyl-L-alanine; D-α,γ-diaminobutyric acid; L-α,γ-diaminobutyric acid; β-cyclopropyl-L-alanine; (N-β-(2,4-dinitrophenyl))-L-α,β-diaminopropionic acid; (N-β-1-(4,4-dimethyl-2,6-dioxocyclohex-1-ylidene)ethyl)-D-α,β-diaminopropionic acid; (N-β-1-(4,4-dimethyl-2,6-dioxocyclohex-1-ylidene)ethyl)-L-α,β-diaminopropionic acid; (N-β-4-methyltrityl)-L-α,β-diaminopropionic acid; (N-3-allyloxycarbonyl)-L-α,β-diaminopropionic acid; (N-γ-1-(4,4-dimethyl-2,6-dioxocyclohex-1-ylidene)ethyl)-D-α,γ-diaminobutyric acid; (N-γ-1-(4,4-dimethyl-2,6-dioxocyclohex-1-ylidene)ethyl)-L-α,γ-diaminobutyric acid; (N-γ-4-methyltrityl)-D-α,γ-diaminobutyric acid; (N-γ-4-methyltrityl)-L-α,γ-diaminobutyric acid; (N-γ-allyloxycarbonyl)-L-α,γ-diaminobutyric acid; D-α,γ-diaminobutyric acid; 4,5-dehydro-L-leucine; cyclopentyl-D-Gly-OH; cyclopentyl-Gly-OH; D-allylglycine; D-homocyclohexylalanine; L-1-pyrenylalanine; L-2-aminocaproic acid; L-allylglycine; L-homocyclohexylalanine; and N-(2-hydroxy-4-methoxy-Bzl)-Gly-OH.

[0121] Amino acid analogues include analogues of arginine or lysine. Examples of amino acid analogues of arginine and lysine include, but are not limited to, the following: citrulline; L-2-amino-3-guanidinopropionic acid; L-2-amino-3-ureidopropionic acid; L-citrulline; Lys(Me)₂-OH; Lys(N₃)—OH; Nδ-benzyloxycarbonyl-L-ornithine; Nω-nitro-D-arginine; Nω-nitro-L-arginine; α-methyl-ornithine; 2,6-diaminoheptanedioic acid; L-ornithine; (Nδ-1-(4,4-dimethyl-2,6-dioxo-cyclohex-1-ylidene)ethyl)-D-ornithine; (Nδ-1-(4,4-dimethyl-2,6-dioxo-cyclohex-1-ylidene)ethyl)-L-ornithine; (Nδ-4-methyltrityl)-D-omithine; (Nδ-4-methyltrityl)-L-ornithine; D-omithine; L-omithine; Arg(Me)(Pbf)-OH; Arg(Me)₂-OH (asymmetrical); Arg(Me)₂-OH (symmetrical); Lys(ivDde)-OH; Lys(Me)₂-OH.HCl; Lys(Me₃)-OH chloride; Nω-nitro-D-arginine; and Nω-nitro-L-arginine.

[0122] Amino acid analogues include analogues of aspartic or glutamic acids. Examples of amino acid analogues of aspartic and glutamic acids include, but are not limited to, the following: α-methyl-D-aspartic acid; α-methyl-glutamic acid; α-methyl-L-aspartic acid; γ-methylene-glutamic acid; (N-γ-ethyl)-L-glutamine; [N-α-(4-aminobenzoyl)]-L-glutamic acid; 2,6-diaminopimelic acid; L-α-aminosuberic acid; D-2-aminoadipic acid; D-α-aminosuberic acid; α-aminopimelic acid; iminodiacetic acid; L-2-aminoadipic acid; threo-β-methyl-aspartic acid; γ-carboxy-D-glutamic acid γ,γ-di-t-butyl ester; γ-carboxy-L-glutamic acid γ,γ-di-t-butyl ester; Glu(OAll)-OH; L-Asu(OtBu)-OH; and pyroglutamic acid.

[0123] Amino acid analogues include analogues of cysteine and methionine. Examples of amino acid analogues of cysteine and methionine include, but are not limited to, Cys(farnesyl)-OH, Cys(farnesyl)-OMe, α-methyl-methionine, Cys(2-hydroxyethyl)-OH, Cys(3-aminopropyl)-OH, 2-amino-4-(ethylthio)butyric acid, buthionine, buthioninesulfoximine, ethionine, methionine methylsulfonium chloride, selenomethionine, cysteic acid, [2-(4-pyridyl)ethyl]-DL-penicillamine, [2-(4-pyridyl)ethyl]-L-cysteine, 4-methoxybenzyl-D-penicillamine, 4-methoxybenzyl-L-penicillamine, 4-methylbenzyl-D-penicillamine, 4-methylbenzyl-L-penicillamine, benzyl-D-cysteine, benzyl-L-cysteine, benzyl-DL-homocysteine, carbamoyl-L-cysteine, carboxyethyl-L-cysteine, carboxymethyl-L-cysteine, diphenylmethyl-L-cysteine, ethyl-L-cysteine, methyl-L-cysteine, t-butyl-D-cysteine, trityl-L-homocysteine, trityl-D-penicillamine, cystathionine, homocystine, L-homocystine, (2-aminoethyl)-L-cysteine, seleno-L-cystine, cystathionine, Cys(StBu)-OH, and acetamidomethyl-D-penicillamine.

[0124] Amino acid analogues include analogues of phenylalanine and tyrosine. Examples of amino acid analogues of phenylalanine and tyrosine include β-methyl-phenylalanine, β-hydroxyphenylalanine, α-methyl-3-methoxy-DL-phenylalanine, α-methyl-D-phenylalanine, α-methyl-L-phenylalanine, 1,2,3,4-tetrahydroisoquinoline-3-carboxylic acid, 2,4-dichloro-phenylalanine, 2-(trifluoromethyl)-D-phenylalanine, 2-(trifluoromethyl)-L-phenylalanine, 2-bromo-D-phenylalanine, 2-bromo-L-phenylalanine, 2-chloro-D-phenylalanine, 2-chloro-L-phenylalanine, 2-cyano-D-phenylalanine, 2-cyano-L-phenylalanine, 2-fluoro-D-phenylalanine, 2-fluoro-L-phenylalanine, 2-methyl-D-phenylalanine, 2-methyl-L-phenylalanine, 2-nitro-D-phenylalanine, 2-nitro-L-phenylalanine, 2;4;5-trihydroxy-phenylalanine, 3,4,5-trifluoro-D-phenylalanine, 3,4,5-trifluoro-L-phenylalanine, 3,4-dichloro-D-phenylalanine, 3,4-dichloro-L-phenylalanine, 3,4-difluoro-D-phenylalanine, 3,4-difluoro-L-phenylalanine, 3,4-dihydroxy-L-phenylalanine, 3,4-dimethoxy-L-phenylalanine, 3,5,3′-triiodo-L-thyronine, 3,5-diiodo-D-tyrosine, 3,5-diiodo-L-tyrosine, 3,5-diiodo-L-thyronine, 3-(trifluoromethyl)-D-phenylalanine, 3-(trifluoromethyl)-L-phenylalanine, 3-amino-L-tyrosine, 3-bromo-D-phenylalanine, 3-bromo-L-phenylalanine, 3-chloro-D-phenylalanine, 3-chloro-L-phenylalanine, 3-chloro-L-tyrosine, 3-cyano-D-phenylalanine, 3-cyano-L-phenylalanine, 3-fluoro-D-phenylalanine, 3-fluoro-L-phenylalanine, 3-fluoro-tyrosine, 3-iodo-D-phenylalanine, 3-iodo-L-phenylalanine, 3-iodo-L-tyrosine, 3-methoxy-L-tyrosine, 3-methyl-D-phenylalanine, 3-methyl-L-phenylalanine, 3-nitro-D-phenylalanine, 3-nitro-L-phenylalanine, 3-nitro-L-tyrosine, 4-(trifluoromethyl)-D-phenylalanine, 4-(trifluoromethyl)-L-phenylalanine, 4-amino-D-phenylalanine, 4-amino-L-phenylalanine, 4-benzoyl-D-phenylalanine, 4-benzoyl-L-phenylalanine, 4-bis(2-chloroethyl)amino-L-phenylalanine, 4-bromo-D-phenylalanine, 4-bromo-L-phenylalanine, 4-chloro-D-phenylalanine, 4-chloro-L-phenylalanine, 4-cyano-D-phenylalanine, 4-cyano-L-phenylalanine, 4-fluoro-D-phenylalanine, 4-fluoro-L-phenylalanine, 4-iodo-D-phenylalanine, 4-iodo-L-phenylalanine, homophenylalanine, thyroxine, 3,3-diphenylalanine, thyronine, ethyl-tyrosine, and methyl-tyrosine.

[0125] Amino acid analogues include analogues of proline. Examples of amino acid analogues of proline include, but are not limited to, 3,4-dehydro-proline, 4-fluoro-proline, cis-4-hydroxy-proline, thiazolidine-2-carboxylic acid, and trans-4-fluoro-proline.

[0126] Amino acid analogues include analogues of serine and threonine. Examples of amino acid analogues of serine and threonine include, but are not limited to, 3-amino-2-hydroxy-5-methylhexanoic acid, 2-amino-3-hydroxy-4-methylpentanoic acid, 2-amino-3-ethoxybutanoic acid, 2-amino-3-methoxybutanoic acid, 4-amino-3-hydroxy-6-methylheptanoic acid, 2-amino-3-benzyloxypropionic acid, 2-amino-3-benzyloxypropionic acid, 2-amino-3-ethoxypropionic acid, 4-amino-3-hydroxybutanoic acid, and α-methylserine.

[0127] Amino acid analogues include analogues of tryptophan. Examples of amino acid analogues of tryptophan include, but are not limited to, the following: α-methyl-tryptophan; β-(3-benzothienyl)-D-alanine; β-(3-benzothienyl)-L-alanine; 1-methyl-tryptophan; 4-methyl-tryptophan; 5-benzyloxy-tryptophan; 5-bromo-tryptophan; 5-chloro-tryptophan; 5-fluoro-tryptophan; 5-hydroxy-tryptophan; 5-hydroxy-L-tryptophan; 5-methoxy-tryptophan; 5-methoxy-L-tryptophan; 5-methyl-tryptophan; 6-bromo-tryptophan; 6-chloro-D-tryptophan; 6-chloro-tryptophan; 6-fluoro-tryptophan; 6-methyl-tryptophan; 7-benzyloxy-tryptophan; 7-bromo-tryptophan; 7-methyl-tryptophan; D-1,2,3,4-tetrahydro-norharman-3-carboxylic acid; 6-methoxy-1,2,3,4-tetrahydronorharman-1-carboxylic acid; 7-azatryptophan; L-1,2,3,4-tetrahydro-norharman-3-carboxylic acid; 5-methoxy-2-methyl-tryptophan; and 6-chloro-L-tryptophan.

[0128] In some embodiments, amino acid analogues are racemic. In some embodiments, the D isomer of the amino acid analogue is used. In some embodiments, the L isomer of the amino acid analogue is used. In other embodiments, the amino acid analogue comprises chiral centers that are in the R or S configuration. In still other embodiments, the amino group(s) of a β-amino acid analogue is substituted with a protecting group, e.g., tert-butyloxycarbonyl (BOC group), 9-fluorenylmethyloxycarbonyl (FMOC), tosyl, and the like. In yet other embodiments, the carboxylic acid functional group of a β-amino acid analogue is protected, e.g., as its ester derivative. In some embodiments the salt of the amino acid analogue is used.

[0129] A “non-essential” amino acid residue is a residue that can be altered from the wild-type sequence of a polypeptide without abolishing or substantially abolishing its essential biological or biochemical activity (e.g., receptor binding or activation). An “essential” amino acid residue is a residue that, when altered from the wild-type sequence of the polypeptide, results in abolishing or substantially abolishing the polypeptide's essential biological or biochemical activity.

[0130] A “conservative amino acid substitution” is one in which the amino acid residue is replaced with an amino acid residue having a similar side chain. Families of amino acid residues having similar side chains have been defined in the art. These families include amino acids with basic side chains (e.g., K, R, H), acidic side chains (e.g., D, E), uncharged polar side chains (e.g., G, N, Q, S, T, Y, C), nonpolar side chains (e.g., A, V, L, I, P, F, M, W), beta-branched side chains (e.g., T, V, I) and aromatic side chains (e.g., Y, F, W, H). Thus, a predicted nonessential amino acid residue in a polypeptide, e.g., is replaced with another amino acid residue from the same side chain family. Other examples of acceptable substitutions are substitutions based on isosteric considerations (e.g., norleucine for methionine) or other properties (e.g., 2-thienylalanine for phenylalanine, or 6-Cl-tryptophan for tryptophan).

[0131] The term “capping group” refers to the chemical moiety occurring at either the carboxy or amino terminus of the polypeptide chain of the subject peptidomimetic macrocycle. The capping group of a carboxy terminus includes an unmodified carboxylic acid (i.e. —COOH) or a carboxylic acid with a substituent. For example, the carboxy terminus can be substituted with an amino group to yield a carboxamide at the C-terminus. Various substituents include but are not limited to primary, secondary, and tertiary amines, including pegylated secondary amines. Representative secondary amine capping groups for the C-terminus include:

[chemical structure]

[0132] The capping group of an amino terminus includes an unmodified amine (i.e. —NH₂) or an amine with a substituent. For example, the amino terminus can be substituted with an acyl group to yield a carboxamide at the N-terminus. Various substituents include but are not limited to substituted acyl groups, including C₁-C₆ carbonyls, C₇-C₃₀ carbonyls, and pegylated carbamates. Representative capping groups for the N-terminus include, but are not limited to, 4-FBzl (4-fluoro-benzyl) and the following:

[chemical structure]

[0133] The term “member” as used herein in conjunction with macrocycles or macrocycle-forming linkers refers to the atoms that form or can form the macrocycle, and excludes substituent or side chain atoms. By analogy, cyclodecane, 1,2-difluoro-decane and 1,3-dimethyl cyclodecane are all considered ten-membered macrocycles as the hydrogen or fluoro substituents or methyl side chains do not participate in forming the macrocycle.

[0134] The symbol “ [symbol] ” when used as part of a molecular structure refers to a single bond or a trans or cis double bond.

[0135] The term “amino acid side chain” refers to a moiety attached to the α-carbon (or another backbone atom) in an amino acid. For example, the amino acid side chain for alanine is methyl, the amino acid side chain for phenylalanine is phenylmethyl, the amino acid side chain for cysteine is thiomethyl, the amino acid side chain for aspartate is carboxymethyl, the amino acid side chain for tyrosine is 4-hydroxyphenylmethyl, etc. Other non-naturally-occurring amino acid side chains are also included, for example, those that occur in nature (e.g., an amino acid metabolite) or those that are made synthetically (e.g., an α,α di-substituted amino acid).

[0136] The term “α,α di-substituted amino” acid refers to a molecule or moiety containing both an amino group and a carboxyl group bound to a carbon (the β-carbon) that is attached to two natural or non-natural amino acid side chains.

[0137] The term “polypeptide” encompasses two or more naturally- or non-naturally-occurring amino acids joined by a covalent bond (e.g., an amide bond). Polypeptides as described herein include full length proteins (e.g., fully processed proteins) as well as shorter amino acid sequences (e.g., fragments of naturally-occurring proteins or synthetic polypeptide fragments).

[0138] The term “first C-terminal amino acid” refers to the amino acid which is closest to the C-terminus. The term “second C-terminal amino acid” refers to the amino acid attached at the N-terminus of the first C-terminal amino acid.

[0139] The term “macrocyclization reagent” or “macrocycle-forming reagent” as used herein refers to any reagent which can be used to prepare a peptidomimetic macrocycle by mediating the reaction between two reactive groups. Reactive groups can be, for example, an azide and alkyne, in which case macrocyclization reagents include, without limitation, Cu reagents such as reagents which provide a reactive Cu(I) species, such as CuBr, CuI or CuOTf, as well as Cu(II) salts such as Cu(CO₂CH₃)₂, CuSO₄, and CuCl₂ that can be converted in situ to an active Cu(I) reagent by the addition of a reducing agent such as ascorbic acid or sodium ascorbate. Macrocyclization reagents can additionally include, for example, Ru reagents known in the art such as Cp*RuCl(PPh₃)₂, [Cp*RuCl]₄ or other Ru reagents which can provide a reactive Ru(II) species. In other cases, the reactive groups are terminal olefins. In such embodiments, the macrocyclization reagents or macrocycle-forming reagents are metathesis catalysts including, but not limited to, stabilized, late transition metal carbene complex catalysts such as Group VIII transition metal carbene catalysts. For example, such catalysts are Ru and Os metal centers having a +2 oxidation state, an electron count of 16 and pentacoordinated. In other examples, catalysts have W or Mo centers. In some embodiments, the reactive groups are thiol groups. In some embodiments, the macrocyclization reagent is, for example, a linker functionalized with two thiol-reactive groups such as halogen groups.

[0140] The term “halo” or “halogen” refers to fluorine, chlorine, bromine or iodine or a radical thereof.

[0141] The term “alkyl” refers to a hydrocarbon chain that is a straight chain or branched chain, containing the indicated number of carbon atoms. For example, C₁-C₁₀ indicates that the group has from 1 to 10 (inclusive) carbon atoms in it. In the absence of any numerical designation, “alkyl” is a chain (straight or branched) having 1 to 20 (inclusive) carbon atoms.

[0142] The term “alkylene” refers to a divalent alkyl (i.e., —R—).

[0143] The term “alkenyl” refers to a hydrocarbon chain that is a straight chain or branched chain having one or more carbon-carbon double bonds. The alkenyl moiety contains the indicated number of carbon atoms. For example, C₂-C₁₀ indicates that the group has from 2 to 10 (inclusive) carbon atoms. The term “lower alkenyl” refers to a C₂-C₆ alkenyl chain. In the absence of any numerical designation, “alkenyl” is a chain (straight or branched) having 2 to 20 (inclusive) carbon atoms.

[0144] The term “alkynyl” refers to a hydrocarbon chain that is a straight chain or branched chain having one or more carbon-carbon triple bonds. The alkynyl moiety contains the indicated number of carbon atoms. For example, C₂-C₁₀ indicates that the group has from 2 to 10 (inclusive) carbon atoms. The term “lower alkynyl” refers to a C₂-C₆ alkynyl chain. In the absence of any numerical designation, “alkynyl” is a chain (straight or branched) having 2 to 20 (inclusive) carbon atoms.

[0145] The term “aryl” refers to a 6-carbon monocyclic or 10-carbon bicyclic aromatic ring system wherein 0, 1, 2, 3, or 4 atoms of each ring are substituted by a substituent. Examples of aryl groups include phenyl, naphthyl and the like. The term “arylalkoxy” refers to an alkoxy substituted with aryl.

[0146] “Arylalkyl” refers to an aryl group, as defined above, wherein one of the aryl group's hydrogen atoms has been replaced with a C₁-C₅ alkyl group, as defined above. Representative examples of an arylalkyl group include, but are not limited to, 2-methylphenyl, 3-methylphenyl, 4-methylphenyl, 2-ethylphenyl, 3-ethylphenyl, 4-ethylphenyl, 2-propylphenyl, 3-propylphenyl, 4-propylphenyl, 2-butylphenyl, 3-butylphenyl, 4-butylphenyl, 2-pentylphenyl, 3-pentylphenyl, 4-pentylphenyl, 2-isopropylphenyl, 3-isopropylphenyl, 4-isopropylphenyl, 2-isobutylphenyl, 3-isobutylphenyl, 4-isobutylphenyl, 2-sec-butylphenyl, 3-sec-butylphenyl, 4-sec-butylphenyl, 2-t-butylphenyl, 3-t-butylphenyl and 4-t-butylphenyl.

[0147] “Arylamido” refers to an aryl group, as defined above, wherein one of the aryl group's hydrogen atoms has been replaced with one or more —C(O)NH₂ groups. Representative examples of an arylamido group include 2-C(O)NH₂-phenyl, 3-C(O)NH₂-phenyl, 4-C(O)NH₂-phenyl, 2-C(O)NH₂-pyridyl, 3-C(O)NH₂-pyridyl, and 4-C(O)NH₂-pyridyl.

[0148] “Alkylheterocycle” refers to a C₁-C₅ alkyl group, as defined above, wherein one of the C₁-C₅ alkyl group's hydrogen atoms has been replaced with a heterocycle. Representative examples of an alkylheterocycle group include, but are not limited to, —CH₂CH₂-morpholine, —CH₂CH₂-piperidine, —CH₂CH₂CH₂-morpholine, and —CH₂CH₂CH₂-imidazole.

[0149] “Alkylamido” refers to a C₁-C₅ alkyl group, as defined above, wherein one of the C₁-C₅ alkyl group's hydrogen atoms has been replaced with a —C(O)NH₂ group. Representative examples of an alkylamido group include, but are not limited to, —CH₂—C(O)NH₂, —CH₂CH₂—C(O)NH₂, —CH₂CH₂CH₂C(O)NH₂, —CH₂CH₂CH₂CH₂C(O)NH₂, —CH₂CH₂CH₂CH₂CH₂C(O)NH₂, —CH₂CH(C(O)NH₂)CH₃, —CH₂CH(C(O)NH₂)CH₂CH₃, —CH(C(O)NH₂)CH₂CH₃, —C(CH₃)₂CH₂C(O)NH₂, —CH₂—CH₂—NH—C(O)—CH₃, —CH₂—CH₂—NH—C(O)—CH₃—CH3, and —CH₂—CH₂—NH—C(O)—CH═CH₂.

[0150] “Alkanol” refers to a C₁-C₅ alkyl group, as defined above, wherein one of the C₁-C₅ alkyl group's hydrogen atoms has been replaced with a hydroxyl group. Representative examples of an alkanol group include, but are not limited to, —CH₂OH, —CH₂CH₂OH, —CH₂CH₂CH₂OH, —CH₂CH₂CH₂CH₂OH, —CH₂CH₂CH₂ CH₂CH₂OH, —CH₂CH(OH)CH₃, —CH₂CH(OH)CH₂CH₃, —CH(OH)CH₃ and —C(CH₃)₂CH₂OH.

[0151] “Alkylcarboxy” refers to a C₁-C₅ alkyl group, as defined above, wherein one of the C₁-C₅ alkyl group's hydrogen atoms has been replaced with a —COOH group. Representative examples of an alkylcarboxy group include, but are not limited to, —CH₂COOH, —CH₂CH₂COOH, —CH₂CH₂CH₂COOH, —CH₂CH₂CH₂CH₂COOH, —CH₂CH(COOH)CH₃, —CH₂CH₂CH₂CH₂CH₂COOH, —CH₂CH(COOH)CH₂CH₃, —CH(COOH)CH₂CH₃ and —C(CH₃)₂CH₂COOH.

[0152] The term “cycloalkyl” as employed herein includes saturated and partially unsaturated cyclic hydrocarbon groups having 3 to 12 carbons, preferably 3 to 8 carbons, and more preferably 3 to 6 carbons, wherein the cycloalkyl group additionally is optionally substituted. Some cycloalkyl groups include, without limitation, cyclopropyl, cyclobutyl, cyclopentyl, cyclopentenyl, cyclohexyl, cyclohexenyl, cycloheptyl, and cyclooctyl.

[0153] The term “heteroaryl” refers to an aromatic 5-8 membered monocyclic, 8-12 membered bicyclic, or 11-14 membered tricyclic ring system having 1-3 heteroatoms if monocyclic, 1-6 heteroatoms if bicyclic, or 1-9 heteroatoms if tricyclic, said heteroatoms selected from O, N, or S (e.g., carbon atoms and 1-3, 1-6, or 1-9 heteroatoms of O, N, or S if monocyclic, bicyclic, or tricyclic, respectively), wherein 0, 1, 2, 3, or 4 atoms of each ring are substituted by a substituent. Examples of heteroaryl groups include pyridyl, furyl or furanyl, imidazolyl, benzimidazolyl, pyrimidinyl, thiophenyl or thienyl, quinolinyl, indolyl, thiazolyl, and the like.

[0154] The term “heteroarylalkyl” or the term “heteroaralkyl” refers to an alkyl substituted with a heteroaryl. The term “heteroarylalkoxy” refers to an alkoxy substituted with heteroaryl.

[0155] The term “heterocyclyl” refers to a nonaromatic 5-8 membered monocyclic, 8-12 membered bicyclic, or 11-14 membered tricyclic ring system having 1-3 heteroatoms if monocyclic, 1-6 heteroatoms if bicyclic, or 1-9 heteroatoms if tricyclic, said heteroatoms selected from O, N, or S (e.g., carbon atoms and 1-3, 1-6, or 1-9 heteroatoms of O, N, or S if monocyclic, bicyclic, or tricyclic, respectively), wherein 0, 1, 2 or 3 atoms of each ring are substituted by a substituent. Examples of heterocyclyl groups include piperazinyl, pyrrolidinyl, dioxanyl, morpholinyl, tetrahydrofuranyl, and the like.

[0156] The term “substituent” refers to a group replacing a second atom or group such as a hydrogen atom on any molecule, compound or moiety. Suitable substituents include, without limitation, halo, hydroxy, mercapto, oxo, nitro, haloalkyl, alkyl, alkaryl, aryl, aralkyl, alkoxy, thioalkoxy, aryloxy, amino, alkoxycarbonyl, amido, carboxy, alkanesulfonyl, alkylcarbonyl, and cyano groups.

[0157] In some embodiments, the compounds disclosed herein contain one or more asymmetric centers and thus occur as racemates and racemic mixtures, single enantiomers, individual diastereomers and diastereomeric mixtures. All such isomeric forms of these compounds are included unless expressly provided otherwise. In some embodiments, the compounds disclosed herein are also represented in multiple tautomeric forms, in such instances, the compounds include all tautomeric forms of the compounds described herein (e.g., if alkylation of a ring system results in alkylation at multiple sites, the invention includes all such reaction products). All such isomeric forms of such compounds are included unless expressly provided otherwise. All crystal forms of the compounds described herein are included unless expressly provided otherwise.

[0158] As used herein, the terms “increase” and “decrease” mean, respectively, to cause a statistically significantly (i.e., p<0.1) increase or decrease of at least 5%.

[0159] As used herein, the recitation of a numerical range for a variable is intended to convey that the variable is equal to any of the values within that range. Thus, for a variable which is inherently discrete, the variable is equal to any integer value within the numerical range, including the end-points of the range. Similarly, for a variable which is inherently continuous, the variable is equal to any real value within the numerical range, including the end-points of the range. As an example, and without limitation, a variable which is described as having values between 0 and 2 takes the values 0, 1 or 2 if the variable is inherently discrete, and takes the values 0.0, 0.1, 0.01, 0.001, or any other real values ≥0 and ≤2 if the variable is inherently continuous.

[0160] As used herein, unless specifically indicated otherwise, the word “or” is used in the inclusive sense of “and/or” and not the exclusive sense of “either/or”.

[0161] The term “on average” represents the mean value derived from performing at least three independent replicates for each data point.

[0162] The term “biological activity” encompasses structural and functional properties of a macrocycle. Biological activity is, for example, structural stability, alpha-helicity, affinity for a target, resistance to proteolytic degradation, cell penetrability, intracellular stability, in vivo stability, or any combination thereof.

[0163] The term “binding affinity” refers to the strength of a binding interaction, for example between a peptidomimetic macrocycle and a target. Binding affinity can be expressed, for example, as equilibrium dissociation constant (“K_{D}”), which is expressed in units which are a measure of concentration (e.g. M, mM, μM, nM etc). Numerically, binding affinity and K_{D} values vary inversely, such that a lower binding affinity corresponds to a higher K_{D} value, while a higher binding affinity corresponds to a lower K_{D} value. Where high binding affinity is desirable, “improved” binding affinity refers to higher binding affinity and therefore lower K_{D} values.

[0164] As used herein, the term “treatment” is defined as the application or administration of a therapeutic agent to a patient, or application or administration of a therapeutic agent to an isolated tissue or cell line from a patient, who has a disease, a symptom of disease or a predisposition toward a disease, with the purpose to cure, heal, alleviate, relieve, alter, remedy, ameliorate, improve or affect the disease, the symptoms of disease or the predisposition toward disease.

[0165] The terms “combination therapy” or “combined treatment” or in “combination” as used herein denotes any form of concurrent or parallel treatment with at least two distinct therapeutic agents.

[0166] The term “in vitro efficacy” refers to the extent to which a test compound, such as a peptidomimetic macrocycle, produces a beneficial result in an in vitro test system or assay. In vitro efficacy can be measured, for example, as an “IC₅₀” or “EC₅₀” value, which represents the concentration of the test compound which produces 50% of the maximal effect in the test system.

[0167] The term “ratio of in vitro efficacies” or “in vitro efficacy ratio” refers to the ratio of IC₅₀ or EC₅₀ values from a first assay (the numerator) versus a second assay (the denominator). Consequently, an improved in vitro efficacy ratio for Assay 1 versus Assay 2 refers to a lower value for the ratio expressed as IC₅₀(Assay 1)/IC₅₀(Assay 2) or alternatively as EC₅₀(Assay 1)/EC₅₀(Assay 2). This concept can also be characterized as “improved selectivity” in Assay 1 versus Assay 2, which can be due either to a decrease in the IC₅₀ or EC₅₀ value for Target 1 or an increase in the value for the IC₅₀ or EC₅₀ value for Target 2.

[0168] As used in the present application, “biological sample” means any fluid or other material derived from the body of a normal or diseased subject, such as blood, serum, plasma, lymph, urine, saliva, tears, cerebrospinal fluid, milk, amniotic fluid, bile, ascites fluid, pus, and the like. Also included within the meaning of the term “biological sample” is an organ or tissue extract and culture fluid in which any cells or tissue preparation from a subject has been incubated. The biological samples can be any samples from which genetic material can be obtained. Biological samples can also include solid or liquid cancer cell samples or specimens. The cancer cell sample can be a cancer cell tissue sample. In some embodiments, the cancer cell tissue sample can obtained from surgically excised tissue. Exemplary sources of biological samples include fine needle aspiration, core needle biopsy, vacuum assisted biopsy, incisional biopsy, excisional biopsy, punch biopsy, shave biopsy or skin biopsy. In some cases, the biological samples comprise fine needle aspiration samples. In some embodiments, the biological samples comprise tissue samples, including, for example, excisional biopsy, incisional biopsy, or other biopsy. The biological samples can comprise a mixture of two or more sources; for example, fine needle aspirates and tissue samples. Tissue samples and cellular samples can also be obtained without invasive surgery, for example by punctuating the chest wall or the abdominal wall or from masses of breast, thyroid or other sites with a fine needle and withdrawing cellular material (fine needle aspiration biopsy). In some embodiments, a biological sample is a bone marrow aspirate sample. A biological sample can be obtained by methods known in the art such as the biopsy methods provided herein, swabbing, scraping, phlebotomy, or any other suitable method.

[0169] The term “solid tumor” or “solid cancer” as used herein refers to tumors that usually do not contain cysts or liquid areas. Solid tumors as used herein include sarcomas, carcinomas and lymphomas. In various embodiments, leukemia (cancer of blood) is not solid tumor.

[0170] Solid tumor cancers that can be treated by the methods provided herein include, but are not limited to, sarcomas, carcinomas, and lymphomas. In specific embodiments, solid tumors that can be treated in accordance with the methods described include, but are not limited to, cancer of the breast, liver, neuroblastoma, head, neck, eye, mouth, throat, esophagus, esophagus, chest, bone, lung, kidney, colon, rectum or other gastrointestinal tract organs, stomach, spleen, skeletal muscle, subcutaneous tissue, prostate, breast, ovaries, testicles or other reproductive organs, skin, thyroid, blood, lymph nodes, kidney, liver, pancreas, and brain or central nervous system. Solid tumors that can be treated by the instant methods include tumors and/or metastasis (wherever located) other than lymphatic cancer, for example brain and other central nervous system tumors (including but not limited to tumors of the meninges, brain, spinal cord, cranial nerves and other parts of central nervous system, e.g. glioblastomas or medulla blastemas); head and/or neck cancer; breast tumors; circulatory system tumors (including but not limited to heart, mediastinum and pleura, and other intrathoracic organs, vascular tumors and tumor-associated vascular tissue); excretory system tumors (including but not limited to tumors of kidney, renal pelvis, ureter, bladder, other and unspecified urinary organs); gastrointestinal tract tumors (including but not limited to tumors of the esophagus, stomach, small intestine, colon, colorectal, rectosigmoid junction, rectum, anus and anal canal, tumors involving the liver and intrahepatic bile ducts, gall bladder, other and unspecified parts of biliary tract, pancreas, other and digestive organs); oral cavity tumors (including but not limited to tumors of lip, tongue, gum, floor of mouth, palate, and other parts of mouth, parotid gland, and other parts of the salivary glands, tonsil, oropharynx, nasopharynx, pyriform sinus, hypopharynx, and other sites in the lip, oral cavity and pharynx); reproductive system tumors (including but not limited to tumors of vulva, vagina, Cervix uteri, Corpus uteri, uterus, ovary, and other sites associated with female genital organs, placenta, penis, prostate, testis, and other sites associated with male genital organs); respiratory tract tumors (including but not limited to tumors of nasal cavity and middle ear, accessory sinuses, larynx, trachea, bronchus and lung, e.g. small cell lung cancer or non-small cell lung cancer); skeletal system tumors (including but not limited to tumors of bone and articular cartilage of limbs, bone articular cartilage and other sites); skin tumors (including but not limited to malignant melanoma of the skin, non-melanoma skin cancer, basal cell carcinoma of skin, squamous cell carcinoma of skin, mesothelioma, Kaposi's sarcoma); and tumors involving other tissues including peripheral nerves and autonomic nervous system, connective and soft tissue, retroperitoneum and peritoneum, eye and adnexa, thyroid, adrenal gland and other endocrine glands and related structures, secondary and unspecified malignant neoplasm of lymph nodes, secondary malignant neoplasm of respiratory and digestive systems and secondary malignant neoplasm of other sites.

[0171] In some examples, the solid tumor treated by the methods of the instant disclosure is pancreatic cancer, bladder cancer, colon cancer, liver cancer, colorectal cancer (colon cancer or rectal cancer), breast cancer, prostate cancer, renal cancer, hepatocellular cancer, lung cancer, ovarian cancer, cervical cancer, gastric cancer, esophageal cancer, head and neck cancer, melanoma, neuroendocrine cancers, CNS cancers, brain tumors, bone cancer, skin cancer, ocular tumor, choriocarcinoma (tumor of the placenta), sarcoma or soft tissue cancer.

[0172] In some examples, the solid tumor to be treated by the methods of the instant disclosure is selected bladder cancer, bone cancer, breast cancer, cervical cancer, CNS cancer, colon cancer, ocular tumor, renal cancer, liver cancer, lung cancer, pancreatic cancer, choriocarcinoma (tumor of the placenta), prostate cancer, sarcoma, skin cancer, soft tissue cancer or gastric cancer.

[0173] In some examples, the solid tumor treated by the methods of the instant disclosure is breast cancer. Non limiting examples of breast cancer that can be treated by the instant methods include ductal carcinoma in situ (DCIS or intraductal carcinoma), lobular carcinoma in situ (LCIS), invasive (or infiltrating) ductal carcinoma, invasive (or infiltrating) lobular carcinoma, inflammatory breast cancer, triple-negative breast cancer, paget disease of the nipple, phyllodes tumor (phylloides tumor or cystosarcoma phyllodes), angiosarcoma, adenoid cystic (or adenocystic) carcinoma, low-grade adenosquamous carcinoma, medullary carcinoma, papillary carcinoma, tubular carcinoma, metaplastic carcinoma, micropapillary carcinoma, and mixed carcinoma.

[0174] In some examples, the solid tumor treated by the methods of the instant disclosure is bone cancer. Non limiting examples of bone cancer that can be treated by the instant methods include osteosarcoma, chondrosarcoma, the Ewing Sarcoma Family of Tumors (ESFTs).

[0175] In some examples, the solid tumor treated by the methods of the instant disclosure is skin cancer. Non limiting examples of skin cancer that can be treated by the instant methods include melanoma, basal cell skin cancer, and squamous cell skin cancer.

[0176] In some examples, the solid tumor treated by the methods of the instant disclosure is ocular tumor. Non limiting examples of ocular tumor that can be treated by the methods of the instant disclosure include ocular tumor is choroidal nevus, choroidal melanoma, choroidal metastasis, choroidal hemangioma, choroidal osteoma, iris melanoma, uveal melanoma, intraocular lymphoma, melanocytoma, metastasis retinal capillary hemangiomas, congenital hypertrophy of the RPE, RPE adenoma or retinoblastoma.

[0177] In some embodiments solid tumors treated by the methods disclosed herein exclude cancers that are known to be associated with HPV (Human papillomavirus). The excluded group includes HPV positive cervical cancer, HPV positive anal cancer, and HPV head and neck cancers, such as oropharyngeal cancers.

[0178] The term “liquid cancer” as used herein refers to cancer cells that are present in body fluids, such as blood, lymph and bone marrow. Liquid cancers include leukemia, myeloma and liquid lymphomas. Liquid lymphomas include lymphomas that contain cysts or liquid areas. Liquid cancers as used herein do not include solid tumors, such as sarcomas and carcinomas or solid lymphomas that do not contain cysts or liquid areas.

[0179] Liquid cancer cancers that can be treated by the methods provided herein include, but are not limited to, leukemias, myelomas, and liquid lymphomas. In specific embodiments, liquid cancers that can be treated in accordance with the methods described include, but are not limited to, liquid lymphomas, lekemias, and myelomas. Exemplary liquid lymphomas and leukemias that can be treated in accordance with the methods described include, but are not limited to, chronic lymphocytic leukemia/small lymphocytic lymphoma, B-cell prolymphocytic leukemia, lymphoplasmacytic lymphoma (such as waldenstrom macroglobulinemia), splenic marginal zone lymphoma, plasma cell myeloma, plasmacytoma, monoclonal immunoglobulin deposition diseases, heavy chain diseases, extranodal marginal zone B cell lymphoma, also called malt lymphoma, nodal marginal zone B cell lymphoma (nmzl), follicular lymphoma, mantle cell lymphoma, diffuse large B cell lymphoma, mediastinal (thymic) large B cell lymphoma, intravascular large B cell lymphoma, primary effusion lymphoma, burkitt lymphoma/leukemia, T cell prolymphocytic leukemia, T cell large granular lymphocytic leukemia, aggressive NK cell leukemia, adult T cell leukemia/lymphoma, extranodal NK/T cell lymphoma, nasal type, enteropathy-type T cell lymphoma, hepatosplenic T cell lymphoma, blastic NK cell lymphoma, mycosis fungoides/sezary syndrome, primary cutaneous CD30-positive T cell lymphoproliferative disorders, primary cutaneous anaplastic large cell lymphoma, lymphomatoid papulosis, angioimmunoblastic T cell lymphoma, peripheral T cell lymphoma, unspecified, anaplastic large cell lymphoma, classical Hodgkin lymphomas (nodular sclerosis, mixed cellularity, lymphocyte-rich, lymphocyte depleted or not depleted), and nodular lymphocyte-predominant Hodgkin lymphoma.

[0180] Examples of liquid cancers include cancers involving hyperplastic/neoplastic cells of hematopoietic origin, e.g., arising from myeloid, lymphoid or erythroid lineages, or precursor cells thereof. Exemplary disorders include: acute leukemias, e.g., erythroblastic leukemia and acute megakaryoblastic leukemia. Additional exemplary myeloid disorders include, but are not limited to, acute promyeloid leukemia (APML), acute myelogenous leukemia (AML) and chronic myelogenous leukemia (CML); lymphoid malignancies include, but are not limited to acute lymphoblastic leukemia (ALL) which includes B-lineage ALL and T-lineage ALL, chronic lymphocytic leukemia (CLL), prolymphocytic leukemia (PLL), multiple mylenoma, hairy cell leukemia (HLL) and Waldenstrom's macroglobulinemia (WM). Additional forms of malignant liquid lymphomas include, but are not limited to non-Hodgkin lymphoma and variants thereof, adult T cell leukemia/lymphoma (ATL), cutaneous T-cell lymphoma (CTCL), periphieral T-cell lymphoma (PTCL), large granular lymphocytic leukemia (LGF), Hodgkin's disease and Reed-Sternberg disease. For example, liquid cancers include, but are not limited to, acute lymphocytic leukemia (ALL); T-cell acute lymphocytic leukemia (T-ALL); anaplastic large cell lymphoma (ALCL); chronic myelogenous leukemia (CML); acute myeloid leukemia (AML); chronic lymphocytic leukemia (CLL); B-cell chronic lymphocytic leukemia (B-CLL); diffuse large B-cell lymphomas (DLBCL); hyper eosinophilia/chronic eosinophilia; and Burkitt's lymphoma.

[0181] In some embodiments, the cancer comprises an acute lymphoblastic leukemia; acute myeloid leukemia; AIDS-related cancers; AIDS-related lymphoma; chronic lymphocytic leukemia; chronic myelogenous leukemia; chronic myeloproliferative disorders; adult T cell leukemia/lymphoma (ATL), cutaneous T-cell lymphoma (CTCL), peripheral T-cell lymphoma (PTCL); Hodgkin lymphoma; multiple myeloma; multiple myeloma/plasma cell neoplasm; Non-Hodgkin lymphoma; or primary central nervous system (CNS) lymphoma. In various embodiments, the liquid cancer can be B-cell chronic lymphocytic leukemia, B-cell lymphoma-DLBCL, B-cell lymphoma-DLBCL-germinal center-like, B-cell lymphoma-DLBCL-activated B-cell-like, or Burkitt's lymphoma.

[0182] In some embodiments, a subject treated in accordance with the methods provided herein is a human who has or is diagnosed with cancer lacking p53 deactivating mutation and/or expressing wild type p53. In some embodiments, a subject treated for cancer in accordance with the methods provided herein is a human predisposed or susceptible to cancer lacking p53 deactivating mutation and/or expressing wild type p53. In some embodiments, a subject treated for cancer in accordance with the methods provided herein is a human at risk of developing cancer lacking p53 deactivating mutation and/or expressing wild type p53. A p53 deactivating mutation in some example can be a mutation in DNA-binding domain of the p53 protein. In some examples the p53 deactivating mutation can be a missense mutation. In various examples, the cancer can be determined to lack one or more p53 deactivating mutations selected from mutations at one or more of residues R175, G245, R248, R249, R273, and R282. The lack of p53 deactivating mutation and/or the presence of wild type p53 in the cancer can be determined by any suitable method known in art, for example by sequencing, array based testing, RNA analysis and amplifications methods like PCR.

[0183] In certain embodiments, the human subject is refractory and/or intolerant to one or more other standard treatment of the cancer known in art. In some embodiments, the human subject has had at least one unsuccessful prior treatment and/or therapy of the cancer.

[0184] In some embodiments, a subject treated for tumor in accordance with the methods provided herein is a human, who has or is diagnosed with a tumor. In other embodiments, a subject treated for tumor in accordance with the methods provided herein is a human, predisposed or susceptible to a tumor. In some embodiments, a subject treated for tumor in accordance with the methods provided herein is a human, at risk of developing a tumor.

[0185] In some embodiments, a subject treated for tumor in accordance with the methods provided herein is a human, who has or is diagnosed with a tumor, determined to lack a p53 deactivating mutation and/or expressing wild type p53. In other embodiments, a subject treated for tumor in accordance with the methods provided herein is a human, predisposed or susceptible to a tumor, determined to lack a p53 deactivating mutation and/or expressing wild type p53. In some embodiments, a subject treated for tumor in accordance with the methods provided herein is a human, at risk of developing a tumor, determined to lack a p53 deactivating mutation and/or expressing wild type p53. A p53 deactivating mutation, as used herein is any mutation that leads to loss of (or a decrease in) the in vitro apoptotic activity of p53.

[0186] In some embodiments, the subject treated for tumor in accordance with the methods provided herein is a human, who has or is diagnosed with a tumor, determined to have a p53 gain of function mutation. In other embodiments, a subject treated for tumor in accordance with the methods provided herein is a human, predisposed or susceptible to a tumor, determined to have a p53 gain of function mutation. In some embodiments, a subject treated for tumor in accordance with the methods provided herein is a human, at risk of developing a tumor, determined to have a p53 gain of function mutation. A p53 gain of function mutation, as used herein is any mutation such that the mutant p53 exerts oncogenic functions beyond their negative domination over the wild-type p53 tumor suppressor functions. The p53 gain of function mutant protein mat exhibit new activities that can contribute actively to various stages of tumor progression and to increased resistance to anticancer treatments. Accordingly, in some embodiments, a subject with a tumor in accordance with the composition as provided herein is a human who has or is diagnosed with a tumor that is determined to have a p53 gain of function mutation.

[0187] In some embodiments, the subject treated for tumor in accordance with the methods provided herein is a human, who has or is diagnosed with a tumor that is not p53 negative. In other embodiments, a subject treated for tumor in accordance with the methods provided herein is a human, predisposed or susceptible to a tumor that is not p53 negative. In some embodiments, a subject treated for tumor in accordance with the methods provided herein is a human, at risk of developing a tumor that is not p53 negative.

[0188] In some embodiments, the subject treated for tumor in accordance with the methods provided herein is a human, who has or is diagnosed with a tumor that expresses p53 with partial loss of function mutation. In other embodiments, a subject treated for tumor in accordance with the methods provided herein is a human, predisposed or susceptible to a tumor that expresses p53 with partial loss of function mutation. In some embodiments, a subject treated for tumor in accordance with the methods provided herein is a human, at risk of developing a tumor that expresses p53 with partial loss of function mutation. As used herein “a partial loss of p53 function” mutation means that the mutant p53 exhibits some level of function of normal p53, but to a lesser or slower extent. For example, a partial loss of p53 function can mean that the cells become arrested in cell division to a lesser or slower extent.

[0189] In some embodiments, the subject treated for tumor in accordance with the methods provided herein is a human, who has or is diagnosed with a tumor that expresses p53 with a copy loss mutation and a deactivating mutation. In other embodiments, a subject treated for tumor in accordance with the methods provided herein is a human, predisposed or susceptible to a tumor that expresses p53 with a copy loss mutation and a deactivating mutation. In some embodiments, a subject treated for tumor in accordance with the methods provided herein is a human, at risk of developing a tumor that expresses p53 with a copy loss mutation and a deactivating mutation.

[0190] In some embodiments, the subject treated for tumor in accordance with the methods provided herein is a human, who has or is diagnosed with a tumor that expresses p53 with a copy loss mutation. In other embodiments, a subject treated for tumor in accordance with the methods provided herein is a human, predisposed or susceptible to a tumor that expresses p53 with a copy loss mutation. In some embodiments, a subject treated for tumor in accordance with the methods provided herein is a human, at risk of developing a tumor that expresses p53 with a copy loss mutation.

[0191] In some embodiments, the subject treated for tumor in accordance with the methods provided herein is a human, who has or is diagnosed with a tumor that expresses p53 with one or more silent mutations. In other embodiments, a subject treated for tumor in accordance with the methods provided herein is a human, predisposed or susceptible to a tumor that expresses p53 with one or more silent mutations. In some embodiments, a subject treated for tumor in accordance with the methods provided herein is a human, at risk of developing a tumor that expresses p53 with one or more silent mutations. Silent mutations as used herein are mutations which cause no change in the encoded p53 amino acid sequence.

[0192] In some embodiments, a subject treated for tumor in accordance with the methods provided herein is a human, who has or is diagnosed with a tumor, determined to lack a dominant p53 deactivating mutation. Dominant p53 deactivating mutation or dominant negative mutation, as used herein, is a mutation wherein the mutated p53 inhibits or disrupt the activity of the wild-type p53 gene.

### Peptidomimetic Macrocycles

[0193] In some embodiments, a peptidomimetic macrocycle has the Formula (I):

[chemical structure]

[0194] wherein:
[0195] each A, C, D, and E is independently a natural or non-natural amino acid or an amino acid analog, and each terminal D and E independently optionally includes a capping group;
[0196] each B is independently a natural or non-natural amino acid, an amino acid analog,

[chemical structure]

[—NH-L₃-CO—], [—NH-L₃-SO₂—], or [—NH-L₃-];
[0197] each R₁ and R₂ is independently —H, alkyl, alkenyl, alkynyl, arylalkyl, cycloalkyl, cycloalkylalkyl, heteroalkyl, or heterocycloalkyl, unsubstituted or substituted with halo-, or at least one of R₁ and R₂ forms a macrocycle-forming linker L′ connected to the alpha position of one of said D or E amino acids;
[0198] each R₃ is independently hydrogen, alkyl, alkenyl, alkynyl, arylalkyl, heteroalkyl, cycloalkyl, heterocycloalkyl, cycloalkylalkyl, aryl, or heteroaryl, optionally substituted with R₅;
[0199] each L and L′ is independently a macrocycle-forming linker of the formula -L₁-L₂-;
[0200] each L₁, L₂, and L₃ is independently alkylene, alkenylene, alkynylene, heteroalkylene, cycloalkylene, heterocycloalkylene, arylene, heteroarylene, or [—R₄—K—R₄-]ₙ, each being optionally substituted with R₅;
[0201] each R₄ is independently alkylene, alkenylene, alkynylene, heteroalkylene, cycloalkylene, heterocycloalkylene, arylene, or heteroarylene;
[0202] each K is independently O, S, SO, SO₂, CO, CO₂, or CONR₃;
[0203] each R₅ is independently halogen, alkyl, —OR₆, —N(R₆)₂, —SR₆, —SOR₆, —SO₂R₆, —CO₂R₆, a fluorescent moiety, a radioisotope or a therapeutic agent;
[0204] each R₆ is independently —H, alkyl, alkenyl, alkynyl, arylalkyl, cycloalkylalkyl, heterocycloalkyl, a fluorescent moiety, a radioisotope or a therapeutic agent;
[0205] each R₇ is independently —H, alkyl, alkenyl, alkynyl, arylalkyl, cycloalkyl, heteroalkyl, cycloalkylalkyl, heterocycloalkyl, aryl, or heteroaryl, optionally substituted with R₅, or part of a cyclic structure with a D residue;
[0206] each R₈ is independently —H, alkyl, alkenyl, alkynyl, arylalkyl, cycloalkyl, heteroalkyl, cycloalkylalkyl, heterocycloalkyl, aryl, or heteroaryl, optionally substituted with R₅, or part of a cyclic structure with an E residue;
[0207] each v and w is independently an integer from 1-1000, for example 1-500, 1-200, 1-100, 1-50, 1-30, 1-20, or 1-10;
[0208] u is an integer from 1-10, for example 1-5, 1-3 or 1-2;
[0209] each x, y, and z is independently an integer from 0-10, for example the sum of x+y+z is 2, 3, or 6; and
[0210] n is an integer from 1-5.

[0211] In some embodiments, v and w are integers from 1-30. In some embodiments, w is an integer from 3-1000, for example 3-500, 3-200, 3-100, 3-50, 3-30, 3-20, or 3-10. In some embodiments, the sum of x+y+z is 3 or 6. In some embodiments, the sum of x+y+z is 3. In other embodiments, the sum of x+y+z is 6.

[0212] In some embodiments, w is an integer from 3-10, for example 3-6, 3-8, 6-8, or 6-10. In some embodiments, w is 3. In other embodiments, w is 6. In some embodiments, v is an integer from 1-1000, for example 1-500, 1-200, 1-100, 1-50, 1-30, 1-20, or 1-10. In some embodiments, v is 2.

[0213] In an embodiment of any of the Formulas described herein, L₁ and L₂, either alone or in combination, do not form a triazole or a thioether.

[0214] In one example, at least one of R₁ and R₂ is alkyl that is unsubstituted or substituted with halo-. In another example, both R₁ and R₂ are independently alkyl that is unsubstituted or substituted with halo-. In some embodiments, at least one of R₁ and R₂ is methyl. In other embodiments, R₁ and R₂ are methyl.

[0215] In some embodiments, x+y+z is at least 3. In other embodiments, x+y+z is 1, 2, 3, 4, 5, 6, 7, 8, 9 or 10. In some embodiments, the sum of x+y+z is 3 or 6. In some embodiments, the sum of x+y+z is 3. In other embodiments, the sum of x+y+z is 6. Each occurrence of A, B, C, D or E in a macrocycle or macrocycle precursor is independently selected. For example, a sequence represented by the formula [A]ₓ, when x is 3, encompasses embodiments wherein the amino acids are not identical, e.g. Gln-Asp-Ala as well as embodiments wherein the amino acids are identical, e.g. Gln-Gln-Gln. This applies for any value of x, y, or z in the indicated ranges. Similarly, when u is greater than 1, each compound can encompass peptidomimetic macrocycles which are the same or different. For example, a compound can comprise peptidomimetic macrocycles comprising different linker lengths or chemical compositions.

[0216] In some embodiments, the peptidomimetic macrocycle comprises a secondary structure which is an α-helix and R₈ is —H, allowing for intra-helical hydrogen bonding. In some embodiments, at least one of A, B, C, D or E is an α,α-disubstituted amino acid. In one example, B is an α,α-disubstituted amino acid. For instance, at least one of A, B, C, D or E is 2-aminoisobutyric acid. In other embodiments, at least one of A, B, C, D or E is

[chemical structure]

[0217] In other embodiments, the length of the macrocycle-forming linker L as measured from a first Cα to a second Cα is selected to stabilize a desired secondary peptide structure, such as an α-helix formed by residues of the peptidomimetic macrocycle including, but not necessarily limited to, those between the first Cα to a second Cα.

[0218] In some embodiments, peptidomimetic macrocycles are also provided of the formula:

[chemical structure]

[0219] wherein:
[0220] each of Xaa₃, Xaa₅, Xaa₆, Xaa₇, Xaa₈, Xaa₉, and Xaa₁₀ is individually an amino acid, wherein at least three of Xaa₃, Xaa₅, Xaa₆, Xaa₇, Xaa₈, Xaa₉, and Xaa₁₀ are the same amino acid as the amino acid at the corresponding position of the sequence Phe₃-X₄-His₅-Tyr₆-Trp₇-Ala₈-Gln₉-Leu₁₀-X₁₁-Ser₁₂ (SEQ ID NO: 8), wherein each X is an amino acid;
[0221] each D and E is independently a natural or non-natural amino acid or an amino acid analog;
[0222] R₁ and R₂ are independently —H, alkyl, alkenyl, alkynyl, arylalkyl, cycloalkyl, cycloalkylalkyl, heteroalkyl, or heterocycloalkyl, unsubstituted or substituted with halo-; or at least one of R₁ and R₂ forms a macrocycle-forming linker L′ connected to the alpha position of one of said D or E amino acids;
[0223] each L and L′ is independently a macrocycle-forming linker of the formula -L₁-L₂-;
[0224] each L₁ and L₂ is independently alkylene, alkenylene, alkynylene, heteroalkylene, cycloalkylene, heterocycloalkylene, arylene, heteroarylene, or [—R₄—K—R₄-]ₙ, each being optionally substituted with R₅;
[0225] each R₄ is independently alkylene, alkenylene, alkynylene, heteroalkylene, cycloalkylene, heterocycloalkylene, arylene, or heteroarylene;
[0226] each K is independently O, S, SO, SO₂, CO, CO₂, or CONR₃;
[0227] each R₅ is independently halogen, alkyl, —OR₆, —N(R₆)₂, —SR₆, —SOR₆, —SO₂R₆, —CO₂R₆, a fluorescent moiety, a radioisotope or a therapeutic agent;
[0228] each R₆ is independently —H, alkyl, alkenyl, alkynyl, arylalkyl, cycloalkylalkyl, heterocycloalkyl, a fluorescent moiety, a radioisotope or a therapeutic agent;
[0229] R₇ is —H, alkyl, alkenyl, alkynyl, arylalkyl, cycloalkyl, heteroalkyl, cycloalkylalkyl, heterocycloalkyl, aryl, or heteroaryl, optionally substituted with R₅, or part of a cyclic structure with a D residue;
[0230] R₈ is —H, alkyl, alkenyl, alkynyl, arylalkyl, cycloalkyl, heteroalkyl, cycloalkylalkyl, heterocycloalkyl, aryl, or heteroaryl, optionally substituted with R₅, or part of a cyclic structure with an E residue;
[0231] v is an integer from 1-1000, for example 1-500, 1-200, 1-100, 1-50, 1-30, 1-20 or 1-10;
[0232] w is an integer from 3-1000, for example 3-500, 3-200, 3-100, 3-50, 3-30, 3-20, or 3-10; and
[0233] n is an integer from 1-5.

[0234] In some embodiments, v and w are integers from 1-30. In some embodiments, w is an integer from 3-1000, for example 3-500, 3-200, 3-100, 3-50, 3-30, 3-20, or 3-10. In some embodiments, the sum of x+y+z is 3 or 6. In some embodiments, the sum of x+y+z is 3. In other embodiments, the sum of x+y+z is 6.

[0235] In some embodiments of any of the Formulas described herein, at least three of Xaa₃, Xaa₅, Xaa₆, Xaa₇, Xaa₈, Xaa₉, and Xaa₁₀ are the same amino acid as the amino acid at the corresponding position of the sequence Phe₃-X₄-His₅-Tyr₆-Trp₇-Ala₈-Gln₉-Leu₁₀-X₁₁-Ser₁₂ (SEQ ID NO: 8). In other embodiments, at least four of Xaa₃, Xaa₅, Xaa₆, Xaa₇, Xaa₈, Xaa₉, and Xaa₁₀ are the same amino acid as the amino acid at the corresponding position of the sequence Phe₃-X₄-His₅-Tyr₆-Trp₇-Ala₈-Gln₉-Leu₁₀-X₁₁-Ser₁₂ (SEQ ID NO: 8). In other embodiments, at least five of Xaa₃, Xaa₅, Xaa₆, Xaa₇, Xaa₈, Xaa₉, and Xaa₁₀ are the same amino acid as the amino acid at the corresponding position of the sequence Phe₃-X₄-His₅-Tyr₆-Trp₇-Ala₈-Gln₉-Leu₁₀-X₁₁-Ser₁₂ (SEQ ID NO: 8). In other embodiments, at least six of Xaa₃, Xaa₅, Xaa₆, Xaa₇, Xaa₈, Xaa₉, and Xaa₁₀ are the same amino acid as the amino acid at the corresponding position of the sequence Phe₃-X₄-His₅-Tyr₆-Trp₇-Ala₈-Gln₉-Leu₁₀-X₁₁-Ser₁₂ (SEQ ID NO: 8). In other embodiments, at least seven of Xaa₃, Xaa₅, Xaa₆, Xaa₇, Xaa₈, Xaa₉, and Xaa₁₀ are the same amino acid as the amino acid at the corresponding position of the sequence Phe₃-X₄-His₅-Tyr₆-Trp₇-Ala₈-Gln₉-Leu₁₀-X₁₁-Ser₁₂ (SEQ ID NO: 8).

[0236] In some embodiments, a peptidomimetic macrocycle has the Formula:

[chemical structure]

wherein:
[0237] each of Xaa₃, Xaa₅, Xaa₆, Xaa₇, Xaa₈, Xaa₉, and Xaa₁₀ is individually an amino acid, wherein at least three of Xaa₃, Xaa₅, Xaa₆, Xaa₇, Xaa₈, Xaa₉, and Xaa₁₀ are the same amino acid as the amino acid at the corresponding position of the sequence Phe₃-X₄-Glu₅-Tyr₆-Trp₇-Ala₈-Gln₉-Leu₁₀/Cba₁₀-X₁₁-Ala₁₂ (SEQ ID NO: 9), wherein each X is an amino acid;
[0238] each D is independently a natural or non-natural amino acid or an amino acid analog;
[0239] each E is independently a natural or non-natural amino acid or an amino acid analog, for example an amino acid selected from Ala (alanine), D-Ala (D-alanine), Aib (α-aminoisobutyric acid), Sar (N-methyl glycine), and Ser (serine);
[0240] R₁ and R₂ are independently —H, alkyl, alkenyl, alkynyl, arylalkyl, cycloalkyl, cycloalkylalkyl, heteroalkyl, or heterocycloalkyl, unsubstituted or substituted with halo-; or at least one of R₁ and R₂ forms a macrocycle-forming linker L′ connected to the alpha position of one of said D or E amino acids;
[0241] each L and L′ is independently a macrocycle-forming linker of the formula -L₁-L₂-;
[0242] each L₁ and L₂ is independently alkylene, alkenylene, alkynylene, heteroalkylene, cycloalkylene, heterocycloalkylene, arylene, heteroarylene, or [—R₄—K—R₄-]ₙ, each being optionally substituted with R₅;
[0243] each R₄ is independently alkylene, alkenylene, alkynylene, heteroalkylene, cycloalkylene, heterocycloalkylene, arylene, or heteroarylene;
[0244] each K is independently O, S, SO, SO₂, CO, CO₂, or CONR₃;
[0245] each R₅ is independently halogen, alkyl, —OR₆, —N(R₆)₂, —SR₆, —SOR₆, —SO₂R₆, —CO₂R₆, a fluorescent moiety, a radioisotope or a therapeutic agent;
[0246] each R₆ is independently —H, alkyl, alkenyl, alkynyl, arylalkyl, cycloalkylalkyl, heterocycloalkyl, a fluorescent moiety, a radioisotope or a therapeutic agent;
[0247] R₇ is —H, alkyl, alkenyl, alkynyl, arylalkyl, cycloalkyl, heteroalkyl, cycloalkylalkyl, heterocycloalkyl, aryl, or heteroaryl, optionally substituted with R₅, or part of a cyclic structure with a D residue;
[0248] R₈ is —H, alkyl, alkenyl, alkynyl, arylalkyl, cycloalkyl, heteroalkyl, cycloalkylalkyl, heterocycloalkyl, aryl, or heteroaryl, optionally substituted with R₅, or part of a cyclic structure with an E residue;
[0249] v is an integer from 1-1000, for example 1-500, 1-200, 1-100, 1-50, 1-30, 1-20, or 1-10;
[0250] w is an integer from 3-1000, for example 3-500, 3-200, 3-100, 3-50, 3-30, 3-20, or 3-10; and
[0251] n is an integer from 1-5.

[0252] In some embodiments of the above Formula, at least three of Xaa₃, Xaa₅, Xaa₆, Xaa₇, Xaa₈, Xaa₉, and Xaa₁₀ are the same amino acid as the amino acid at the corresponding position of the sequence Phe₃-X₄-Glu₅-Tyr₆-Trp₇-Ala₈-Gln₉-Leu₁₀/Cba₁₀-X₁₁-Ala₁₂ (SEQ ID NO: 9). In other embodiments of the above Formula, at least four of Xaa₃, Xaa₅, Xaa₆, Xaa₇, Xaa₈, Xaa₉, and Xaa₁₀ are the same amino acid as the amino acid at the corresponding position of the sequence Phe₃-X₄-Glu₅-Tyr₆-Trp₇-Ala₈-Gln₉-Leu₁₀/Cba₁₀-X₁₁-Ala₁₂ (SEQ ID NO: 9). In other embodiments of the above Formula, at least five of Xaa₃, Xaa₅, Xaa₆, Xaa₇, Xaa₈, Xaa₉, and Xaa₁₀ are the same amino acid as the amino acid at the corresponding position of the sequence Phe₃-X₄-Glu₅-Tyr₆-Trp₇-Ala₈-Gln₉-Leu₁₀/Cba₁₀-X₁₁-Ala₁₂ (SEQ ID NO: 9). In other embodiments of the above Formula, at least six of Xaa₃, Xaa₅, Xaa₆, Xaa₇, Xaa₈, Xaa₉, and Xaa₁₀ are the same amino acid as the amino acid at the corresponding position of the sequence Phe₃-X₄-Glu₅-Tyr₆-Trp₇-Ala₈-Gln₉-Leu₁₀/Cba₁₀-X₁₁-Ala₁₂ (SEQ ID NO: 9). In other embodiments of the above Formula, at least seven of Xaa₃, Xaa₅, Xaa₆, Xaa₇, Xaa₈, Xaa₉, and Xaa₁₀ are the same amino acid as the amino acid at the corresponding position of the sequence Phe₃-X₄-Glu₅-Tyr₆-Trp₇-Ala₈-Gln₉-Leu₁₀/Cba₁₀-X₁₁-Ala₁₂ (SEQ ID NO: 9).

[0253] In some embodiments, w is an integer from 3-10, for example 3-6, 3-8, 6-8, or 6-10. In some embodiments, w is 3. In other embodiments, w is 6. In some embodiments, v is an integer from 1-10. In some embodiments, v is 2.

[0254] In an embodiment of any of the Formulas described herein, L₁ and L₂, either alone or in combination, do not form a triazole or a thioether.

[0255] In one example, at least one of R₁ and R₂ is alkyl, unsubstituted or substituted with halo-. In another example, both R₁ and R₂ are independently alkyl, unsubstituted or substituted with halo-. In some embodiments, at least one of R₁ and R₂ is methyl. In other embodiments, R₁ and R₂ are methyl.

[0256] In some embodiments, x+y+z is at least 3. In other embodiments, x+y+z is 1, 2, 3, 4, 5, 6, 7, 8, 9 or 10. In some embodiments, the sum of x+y+z is 3 or 6. In some embodiments, the sum of x+y+z is 3. In other embodiments, the sum of x+y+z is 6. Each occurrence of A, B, C, D or E in a macrocycle or macrocycle precursor is independently selected. For example, a sequence represented by the formula [A]ₓ, when x is 3, encompasses embodiments wherein the amino acids are not identical, e.g. Gln-Asp-Ala as well as embodiments wherein the amino acids are identical, e.g. Gln-Gln-Gln. This applies for any value of x, y, or z in the indicated ranges. Similarly, when u is greater than 1, each compound can encompass peptidomimetic macrocycles which are the same or different. For example, a compound can comprise peptidomimetic macrocycles comprising different linker lengths or chemical compositions.

[0257] In some embodiments, the peptidomimetic macrocycle comprises a secondary structure which is an α-helix and R₈ is —H, allowing intra-helical hydrogen bonding. In some embodiments, at least one of A, B, C, D or E is an α,α-disubstituted amino acid. In one example, B is an α,α-disubstituted amino acid. For instance, at least one of A, B, C, D or E is 2-aminoisobutyric acid. In other embodiments, at least one of A, B, C, D or E is

[chemical structure]

[0258] In other embodiments, the length of the macrocycle-forming linker L as measured from a first Cα to a second Cα is selected to stabilize a desired secondary peptide structure, such as an α-helix formed by residues of the peptidomimetic macrocycle including, but not necessarily limited to, those between the first Cα to a second Cα.

[0259] In some embodiments, a peptidomimetic macrocycle of Formula (I) has Formula (Ia):

[chemical structure]

wherein:
[0260] each A, C, D, and E is independently a natural or non-natural amino acid or an amino acid analog;
[0261] each B is independently a natural or non-natural amino acid, amino acid analog,

[chemical structure]

[—NH-L₃-CO—], [—NH-L₃-SO₂—], or [—NH-L₃-];
[0262] each L is independently a macrocycle-forming linker;
[0263] each L′ is independently alkylene, alkenylene, alkynylene, heteroalkylene, cycloalkylene, heterocycloalkylene, arylene, or heteroarylene, each being optionally substituted with R₅, or a bond, or together with R₁ and the atom to which both R₁ and L′ are bound forms a ring;
[0264] each L″ is independently alkylene, alkenylene, alkynylene, heteroalkylene, cycloalkylene, heterocycloalkylene, arylene, or heteroarylene, each being optionally substituted with R₅, or a bond, or together with R₂ and the atom to which both R₂ and L″ are bound forms a ring;
[0265] each R₁ is independently —H, alkyl, alkenyl, alkynyl, arylalkyl, cycloalkyl, cycloalkylalkyl, heteroalkyl, or heterocycloalkyl, unsubstituted or substituted with halo-, or together with L′ and the atom to which both R₁ and L′ are bound forms a ring;
[0266] each R₂ is independently —H, alkyl, alkenyl, alkynyl, arylalkyl, cycloalkyl, cycloalkylalkyl, heteroalkyl, or heterocycloalkyl, unsubstituted or substituted with halo-, or together with L″ and the atom to which both R₂ and L″ are bound forms a ring;
[0267] each R₃ is independently hydrogen, alkyl, alkenyl, alkynyl, arylalkyl, heteroalkyl, cycloalkyl, heterocycloalkyl, cycloalkylalkyl, aryl, or heteroaryl, optionally substituted with R₅;
[0268] each L₃ is independently alkylene, alkenylene, alkynylene, heteroalkylene, cycloalkylene, heterocycloalkylene, arylene, heteroarylene, or [—R₄—K—R₄-]ₙ, each being optionally substituted with R₅;
[0269] each R₄ is independently alkylene, alkenylene, alkynylene, heteroalkylene, cycloalkylene, heterocycloalkylene, arylene, or heteroarylene;
[0270] each K is independently O, S, SO, SO₂, CO, CO₂, or CONR₃;
[0271] n is an integer from 1-5;
[0272] each R₅ is independently halogen, alkyl, —OR₆, —N(R₆)₂, —SR₆, —SOR₆, —SO₂R₆, —CO₂R₆, a fluorescent moiety, a radioisotope or a therapeutic agent;
[0273] each R₆ is independently —H, alkyl, alkenyl, alkynyl, arylalkyl, cycloalkylalkyl, heterocycloalkyl, a fluorescent moiety, a radioisotope or a therapeutic agent;
[0274] each R₇ is independently —H, alkyl, alkenyl, alkynyl, arylalkyl, cycloalkyl, heteroalkyl, cycloalkylalkyl, heterocycloalkyl, aryl, or heteroaryl, optionally substituted with R₅, or part of a cyclic structure with a D residue;
[0275] each R₈ is independently —H, alkyl, alkenyl, alkynyl, arylalkyl, cycloalkyl, heteroalkyl, cycloalkylalkyl, heterocycloalkyl, aryl, or heteroaryl, optionally substituted with R₅, or part of a cyclic structure with an E residue;
[0276] each v and w is independently an integer from 1-1000, for example 1-500, 1-200, 1-100, 1-50, 1-40, 1-25, 1-20, 1-15, or 1-10;
[0277] each x, y and z is independently an integer from 0-10, for example x+y+z is 2, 3, or 6; and
[0278] u is an integer from 1-10, for example 1-5, 1-3, or 1-2.

[0279] In some embodiments, L is a macrocycle-forming linker of the formula -L₁-L₂-. In some embodiments, each L₁ and L₂ is independently alkylene, alkenylene, alkynylene, heteroalkylene, cycloalkylene, heterocycloalkylene, arylene, heteroarylene, or [—R₄—K—R₄-]ₙ, each being optionally substituted with R₅; each R₄ is independently alkylene, alkenylene, alkynylene, heteroalkylene, cycloalkylene, heterocycloalkylene, arylene, or heteroarylene; each K is independently O, S, SO, SO₂, CO, CO₂, or CONR₃; and n is an integer from 1-5.

[0280] In one example, at least one of R₁ and R₂ is alkyl, unsubstituted or substituted with halo-. In another example, both R₁ and R₂ are independently alkyl, unsubstituted or substituted with halo-. In some embodiments, at least one of R₁ and R₂ is methyl. In other embodiments, R₁ and R₂ are methyl.

[0281] In some embodiments, x+y+z is at least 2. In other embodiments, x+y+z is 1, 2, 3, 4, 5, 6, 7, 8, 9 or 10. Each occurrence of A, B, C, D or E in a macrocycle or macrocycle precursor is independently selected. For example, a sequence represented by the formula [A]ₓ, when x is 3, encompasses embodiments where the amino acids are not identical, e.g. Gln-Asp-Ala as well as embodiments wherein the amino acids are identical, e.g. Gln-Gln-Gln. This applies for any value of x, y, or z in the indicated ranges. Similarly, when u is greater than 1, each compound can encompass peptidomimetic macrocycles which are the same or different. For example, a compound can comprise peptidomimetic macrocycles comprising different linker lengths or chemical compositions.

[0282] In some embodiments, the peptidomimetic macrocycle comprises a secondary structure which is a helix and R₈ is —H, allowing intra-helical hydrogen bonding. In some embodiments, at least one of A, B, C, D or E is an α,α-disubstituted amino acid. In one example, B is an α,α-disubstituted amino acid. For instance, at least one of A, B, C, D or E is 2-aminoisobutyric acid. In other embodiments, at least one of A, B, C, D or E is

[chemical structure]

[0283] In other embodiments, the length of the macrocycle-forming linker L as measured from a first Cα to a second Cα is selected to stabilize a desired secondary peptide structure, such as a helix formed by residues of the peptidomimetic macrocycle including, but not necessarily limited to, those between the first Cα to a second Cα.

[0284] In one embodiment, the peptidomimetic macrocycle of Formula (I) is:

[chemical structure]

wherein each R₁ and R₂ is independently —H, alkyl, alkenyl, alkynyl, arylalkyl, cycloalkyl, cycloalkylalkyl, heteroalkyl, or heterocycloalkyl, unsubstituted or substituted with halo-.

[0285] In related embodiments, the peptidomimetic macrocycle of Formula (I) is:

[chemical structure]

wherein each R₁′ and R₂′ is independently an amino acid.

[0286] In other embodiments, the peptidomimetic macrocycle of Formula (I) is a compound of any of the formulas shown below:

[chemical structure]

[chemical structure]

[chemical structure]

[chemical structure]

wherein “AA” represents any natural or non-natural amino acid side chain and “ [symbol] ” is [D]ᵥ, [E]_{w} as defined above, and n is an integer between 0 and 20, 50, 100, 200, 300, 400 or 500. In some embodiments, n is 0. In other embodiments, n is less than 50.

[0287] Exemplary embodiments of the macrocycle-forming linker L are shown below.

[chemical structure]

[0288] In other embodiments, D and/or E in the compound of Formula I are further modified to facilitate cellular uptake. In some embodiments, lipidating or PEGylating a peptidomimetic macrocycle facilitates cellular uptake, increases bioavailability, increases blood circulation, alters pharmacokinetics, decreases immunogenicity and/or decreases the needed frequency of administration.

[0289] In other embodiments, at least one of [D] and [E] in the compound of Formula I represents a moiety comprising an additional macrocycle-forming linker such that the peptidomimetic macrocycle comprises at least two macrocycle-forming linkers. In a specific embodiment, a peptidomimetic macrocycle comprises two macrocycle-forming linkers. In an embodiment, u is 2.

[0290] In some embodiments, the peptidomimetic macrocycles have the Formula (I):

[chemical structure]

wherein:
[0291] each A, C, D, and E is independently a natural or non-natural amino acid or an amino acid analog;
[0292] each B is independently a natural or non-natural amino acid, amino acid analog,

[chemical structure]

[—NH-L₃-CO—], [—NH-L₃-SO₂—], or [—NH-L₃-];
[0293] each R₁ and R₂ is independently —H, alkyl, alkenyl, alkynyl, arylalkyl, cycloalkyl, cycloalkylalkyl, heteroalkyl, or heterocycloalkyl, unsubstituted or substituted with halo-, or at least one of R₁ and R₂ forms a macrocycle-forming linker L′ connected to the alpha position of one of said D or E amino acids;
[0294] each R₃ is independently hydrogen, alkyl, alkenyl, alkynyl, arylalkyl, heteroalkyl, cycloalkyl, heterocycloalkyl, cycloalkylalkyl, aryl, or heteroaryl, optionally substituted with R₅;
[0295] each L and L′ is independently macrocycle-forming linker of the formula

[chemical structure]

[0296] wherein each L₁, L₂ and L₃ is independently alkylene, alkenylene, alkynylene, heteroalkylene, cycloalkylene, heterocycloalkylene, arylene, heteroarylene, or [—R₄—K—R₄-]ₙ, each being optionally substituted with R₅;
[0297] each R₄ is independently alkylene, alkenylene, alkynylene, heteroalkylene, cycloalkylene, heterocycloalkylene, arylene, or heteroarylene;
[0298] each K is independently O, S, SO, SO₂, CO, CO₂, or CONR₃;
[0299] each R₅ is independently halogen, alkyl, —OR₆, —N(R₆)₂, —SR₆, —SOR₆, —SO₂R₆, —CO₂R₆, a fluorescent moiety, a radioisotope or a therapeutic agent;
[0300] each R₆ is independently —H, alkyl, alkenyl, alkynyl, arylalkyl, cycloalkylalkyl, heterocycloalkyl, a fluorescent moiety, a radioisotope or a therapeutic agent;
[0301] each R₇ is independently —H, alkyl, alkenyl, alkynyl, arylalkyl, cycloalkyl, heteroalkyl, cycloalkylalkyl, heterocycloalkyl, aryl, or heteroaryl, optionally substituted with R₅, or part of a cyclic structure with a D residue;
[0302] each R₈ is independently —H, alkyl, alkenyl, alkynyl, arylalkyl, cycloalkyl, heteroalkyl, cycloalkylalkyl, heterocycloalkyl, aryl, or heteroaryl, optionally substituted with R₅, or part of a cyclic structure with an E residue;
[0303] each v and w is independently an integer from 1-1000;
[0304] each x, y and z is independently an integer from 0-10;
[0305] us is an integer from 1-10; and
[0306] n is an integer from 1-5.

[0307] In one example, at least one of R₁ and R₂ is alkyl that is unsubstituted or substituted with halo-. In another example, both R₁ and R₂ are independently alkyl that are unsubstituted or substituted with halo-. In some embodiments, at least one of R₁ and R₂ is methyl. In other embodiments, R₁ and R₂ are methyl.

[0308] In some embodiments, x+y+z is at least 2. In other embodiments, x+y+z is 1, 2, 3, 4, 5, 6, 7, 8, 9 or 10. Each occurrence of A, B, C, D or E in a macrocycle or macrocycle precursor is independently selected. For example, a sequence represented by the formula [A]ₓ, when x is 3, encompasses embodiments where the amino acids are not identical, e.g. Gln-Asp-Ala as well as embodiments wherein the amino acids are identical, e.g. Gln-Gln-Gln. This applies for any value of x, y, or z in the indicated ranges.

[0309] In some embodiments, each of the first two amino acid represented by E comprises an uncharged side chain or a negatively charged side chain. In some embodiments, each of the first three amino acid represented by E comprises an uncharged side chain or a negatively charged side chain. In some embodiments, each of the first four amino acid represented by E comprises an uncharged side chain or a negatively charged side chain. In some embodiments, one or more or each of the amino acid that is i+1, i+2, i+3, i+4, i+5, and/or i+6 with respect to Xaa₁₃ represented by E comprises an uncharged side chain or a negatively charged side chain.

[0310] In some embodiments, the first C-terminal amino acid and/or the second C-terminal amino acid represented by E comprise a hydrophobic side chain. For example, the first C-terminal amino acid and/or the second C-terminal amino acid represented by E comprises a hydrophobic side chain, for example a small hydrophobic side chain. In some embodiments, the first C-terminal amino acid, the second C-terminal amino acid, and/or the third C-terminal amino acid represented by E comprise a hydrophobic side chain. For example, the first C-terminal amino acid, the second C-terminal amino acid, and/or the third C-terminal amino acid represented by E comprises a hydrophobic side chain, for example a small hydrophobic side chain. In some embodiments, one or more or each of the amino acid that is i+1, i+2, i+3, i+4, i+5, and/or i+6 with respect to Xaa₁₃ represented by E comprises an uncharged side chain or a negatively charged side chain.

[0311] In some embodiments, w is between 1 and 1000. For example, the first amino acid represented by E comprises a small hydrophobic side chain. In some embodiments, w is between 2 and 1000. For example, the second amino acid represented by E comprises a small hydrophobic side chain. In some embodiments, w is between 3 and 1000. For example, the third amino acid represented by E comprises a small hydrophobic side chain. For example, the third amino acid represented by E comprises a small hydrophobic side chain. In some embodiments, w is between 4 and 1000. In some embodiments, w is between 5 and 1000. In some embodiments, w is between 6 and 1000. In some embodiments, w is between 7 and 1000. In some embodiments, w is between 8 and 1000.

[0312] In some embodiments, the peptidomimetic macrocycle comprises a secondary structure which is a helix and R₈ is —H, allowing intra-helical hydrogen bonding. In some embodiments, at least one of A, B, C, D or E is an α,α-disubstituted amino acid. In one example, B is an α,α-disubstituted amino acid. For instance, at least one of A, B, C, D or E is 2-aminoisobutyric acid. In other embodiments, at least one of A, B, C, D or E is

[chemical structure]

[0313] In other embodiments, the length of the macrocycle-forming linker L as measured from a first Cα to a second Cα is selected to stabilize a desired secondary peptide structure, such as a helix formed by residues of the peptidomimetic macrocycle including, but not necessarily limited to, those between the first Cα to a second Cα.

[0314] In some embodiments, L is a macrocycle-forming linker of the formula

[chemical structure]

[0315] In some embodiments, L is a macrocycle-forming linker of the formula

[chemical structure]

or a tautomer thereof.

[0316] Exemplary embodiments of the macrocycle-forming linker L are shown below:

[chemical structure]

[chemical structure]

[chemical structure]

[chemical structure]

[chemical structure]

[chemical structure]

[chemical structure]

[chemical structure]

[chemical structure]

[chemical structure]

[chemical structure]

[chemical structure]

[0317] Amino acids which are used in the formation of triazole crosslinkers are represented according to the legend indicated below. Stereochemistry at the alpha position of each amino acid is S unless otherwise indicated. For azide amino acids, the number of carbon atoms indicated refers to the number of methylene units between the alpha carbon and the terminal azide. For alkyne amino acids, the number of carbon atoms indicated is the number of methylene units between the alpha position and the triazole moiety plus the two carbon atoms within the triazole group derived from the alkyne.
[0318] $5a5 Alpha-Me alkyne 1,5 triazole (5 carbon)
[0319] $5n3 Alpha-Me azide 1,5 triazole (3 carbon)
[0320] $4rn6 Alpha-Me R-azide 1,4 triazole (6 carbon)
[0321] $4a5 Alpha-Me alkyne 1,4 triazole (5 carbon)

[0322] In some embodiments, any of the macrocycle-forming linkers described herein can be used in any combination with any of the sequences shown in TABLE 1, TABLE 1a, TABLE 1b, or TABLE 1c and also with any of the R-substituents indicated herein.

[0323] In some embodiments, the peptidomimetic macrocycle comprises at least one α-helix motif. For example, A, B and/or C in the compound of Formula I include one or more α-helices. As a general matter, α-helices include between 3 and 4 amino acid residues per turn. In some embodiments, the α-helix of the peptidomimetic macrocycle includes 1 to 5 turns and, therefore, 3 to 20 amino acid residues. In specific embodiments, the α-helix includes 1 turn, 2 turns, 3 turns, 4 turns, or 5 turns. In some embodiments, the macrocycle-forming linker stabilizes an α-helix motif included within the peptidomimetic macrocycle. Thus, in some embodiments, the length of the macrocycle-forming linker L from a first Cα to a second Cα is selected to increase the stability of an α-helix.

[0324] In some embodiments, the macrocycle-forming linker spans from 1 turn to 5 turns of the α-helix. In some embodiments, the macrocycle-forming linker spans approximately 1 turn, 2 turns, 3 turns, 4 turns, or 5 turns of the α-helix. In some embodiments, the length of the macrocycle-forming linker is approximately 5 Å to 9 Å per turn of the α-helix, or approximately 6 Å to 8 Å per turn of the α-helix.

[0325] Where the macrocycle-forming linker spans approximately 1 turn of an α-helix, the length is equal to approximately 5 carbon-carbon bonds to 13 carbon-carbon bonds, approximately 7 carbon-carbon bonds to 11 carbon-carbon bonds, or approximately 9 carbon-carbon bonds. Where the macrocycle-forming linker spans approximately 2 turns of an α-helix, the length is equal to approximately 8 carbon-carbon bonds to 16 carbon-carbon bonds, approximately 10 carbon-carbon bonds to 14 carbon-carbon bonds, or approximately 12 carbon-carbon bonds. Where the macrocycle-forming linker spans approximately 3 turns of an α-helix, the length is equal to approximately 14 carbon-carbon bonds to 22 carbon-carbon bonds, approximately 16 carbon-carbon bonds to 20 carbon-carbon bonds, or approximately 18 carbon-carbon bonds. Where the macrocycle-forming linker spans approximately 4 turns of an α-helix, the length is equal to approximately 20 carbon-carbon bonds to 28 carbon-carbon bonds, approximately 22 carbon-carbon bonds to 26 carbon-carbon bonds, or approximately 24 carbon-carbon bonds. Where the macrocycle-forming linker spans approximately 5 turns of an α-helix, the length is equal to approximately 26 carbon-carbon bonds to 34 carbon-carbon bonds, approximately 28 carbon-carbon bonds to 32 carbon-carbon bonds, or approximately 30 carbon-carbon bonds. Where the macrocycle-forming linker spans approximately 1 turn of an α-helix, the linkage contains approximately 4 atoms to 12 atoms, approximately 6 atoms to 10 atoms, or approximately 8 atoms. Where the macrocycle-forming linker spans approximately 2 turns of the α-helix, the linkage contains approximately 7 atoms to 15 atoms, approximately 9 atoms to 13 atoms, or approximately 11 atoms. Where the macrocycle-forming linker spans approximately 3 turns of the α-helix, the linkage contains approximately 13 atoms to 21 atoms, approximately 15 atoms to 19 atoms, or approximately 17 atoms. Where the macrocycle-forming linker spans approximately 4 turns of the α-helix, the linkage contains approximately 19 atoms to 27 atoms, approximately 21 atoms to 25 atoms, or approximately 23 atoms. Where the macrocycle-forming linker spans approximately 5 turns of the α-helix, the linkage contains approximately 25 atoms to 33 atoms, approximately 27 atoms to 31 atoms, or approximately 29 atoms.

[0326] Where the macrocycle-forming linker spans approximately 1 turn of the α-helix, the resulting macrocycle forms a ring containing approximately 17 members to 25 members, approximately 19 members to 23 members, or approximately 21 members. Where the macrocycle-forming linker spans approximately 2 turns of the α-helix, the resulting macrocycle forms a ring containing approximately 29 members to 37 members, approximately 31 members to 35 members, or approximately 33 members. Where the macrocycle-forming linker spans approximately 3 turns of the α-helix, the resulting macrocycle forms a ring containing approximately 44 members to 52 members, approximately 46 members to 50 members, or approximately 48 members. Where the macrocycle-forming linker spans approximately 4 turns of the α-helix, the resulting macrocycle forms a ring containing approximately 59 members to 67 members, approximately 61 members to 65 members, or approximately 63 members. Where the macrocycle-forming linker spans approximately 5 turns of the α-helix, the resulting macrocycle forms a ring containing approximately 74 members to 82 members, approximately 76 members to 80 members, or approximately 78 members.

[0327] In other embodiments, provided are peptidomimetic macrocycles of Formula (II) or (IIa):

[chemical structure]

wherein:
[0328] each A, C, D, and E is independently a natural or non-natural amino acid or an amino acid analog, and the terminal D and E independently optionally include a capping group;
[0329] each B is independently a natural or non-natural amino acid, amino acid analog,

[chemical structure]

[—NH-L₃-CO—], [—NH-L₃-SO₂—], or [—NH-L₃-];
[0330] each R₁ and R₂ is independently —H, alkyl, alkenyl, alkynyl, arylalkyl, cycloalkyl, cycloalkylalkyl, heteroalkyl, or heterocycloalkyl, unsubstituted or substituted with halo-; or at least one of R₁ and R₂ forms a macrocycle-forming linker L′ connected to the alpha position of one of said D or E amino acids;
[0331] each R₃ is independently hydrogen, alkyl, alkenyl, alkynyl, arylalkyl, heteroalkyl, cycloalkyl, heterocycloalkyl, cycloalkylalkyl, aryl, or heteroaryl, optionally substituted with R₅;
[0332] each L and L′ is a macrocycle-forming linker of the formula -L₁-L₂-;
[0333] each L₁, L₂, and L₃ is independently alkylene, alkenylene, alkynylene, heteroalkylene, cycloalkylene, heterocycloalkylene, arylene, heteroarylene, or [—R₄—K—R₄-]ₙ, each being optionally substituted with R₅;
[0334] each R₄ is independently alkylene, alkenylene, alkynylene, heteroalkylene, cycloalkylene, heterocycloalkylene, arylene, or heteroarylene;
[0335] each K is independently O, S, SO, SO₂, CO, CO₂, or CONR₃;
[0336] each R₅ is independently halogen, alkyl, —OR₆, —N(R₆)₂, —SR₆, —SOR₆, —SO₂R₆, —CO₂R₆, a fluorescent moiety, a radioisotope or a therapeutic agent;
[0337] each R₆ is independently —H, alkyl, alkenyl, alkynyl, arylalkyl, cycloalkylalkyl, heterocycloalkyl, a fluorescent moiety, a radioisotope or a therapeutic agent;
[0338] each R₇ is independently —H, alkyl, alkenyl, alkynyl, arylalkyl, cycloalkyl, heteroalkyl, cycloalkylalkyl, heterocycloalkyl, aryl, or heteroaryl, optionally substituted with R₅;
[0339] each v and w is independently an integer from 1-1000;
[0340] u is an integer from 1-10;
[0341] each x, y, and z is independently integers from 0-10; and
[0342] n is an integer from 1-5.

[0343] In one example, L₁ and L₂, either alone or in combination, do not form a triazole or a thioether.

[0344] In one example, at least one of R₁ and R₂ is alkyl, unsubstituted or substituted with halo-. In another example, both R₁ and R₂ are independently alkyl, unsubstituted or substituted with halo-. In some embodiments, at least one of R₁ and R₂ is methyl. In other embodiments, R₁ and R₂ are methyl.

[0345] In some embodiments, x+y+z is at least 1. In other embodiments, x+y+z is at least 2. In other embodiments, x+y+z is 1, 2, 3, 4, 5, 6, 7, 8, 9 or 10. Each occurrence of A, B, C, D or E in a macrocycle or macrocycle precursor is independently selected. For example, a sequence represented by the formula [A]ₓ, when x is 3, encompasses embodiments wherein the amino acids are not identical, e.g. Gln-Asp-Ala as well as embodiments wherein the amino acids are identical, e.g. Gln-Gln-Gln. This applies for any value of x, y, or z in the indicated ranges.

[0346] In some embodiments, the peptidomimetic macrocycle comprises a secondary structure which is an α-helix and R₈ is —H, allowing intra-helical hydrogen bonding. In some embodiments, at least one of A, B, C, D or E is an α,α-disubstituted amino acid. In one example, B is an α,α-disubstituted amino acid. For example, at least one of A, B, C, D or E is 2-aminoisobutyric acid. In other embodiments, at least one of A, B, C, D or E is

[chemical structure]

[0347] In other embodiments, the length of the macrocycle-forming linker L as measured from a first Cα to a second Cα is selected to stabilize a desired secondary peptide structure, such as an α-helix formed by residues of the peptidomimetic macrocycle including, but not necessarily limited to, those between the first Cα to a second Cα.

[0348] Exemplary embodiments of the macrocycle-forming linker -L₁-L₂- are shown below.

[chemical structure]

[0349] In some embodiments, the peptidomimetic macrocycle has the Formula (III) or Formula (IIIa):

[chemical structure]

wherein:
[0350] each Aₐ, Cₐ, Dₐ, Eₐ, A_{b}, C_{b}, and D_{b} is independently a natural or non-natural amino acid or an amino acid analog;
[0351] each Bₐ and B_{b} is independently a natural or non-natural amino acid, amino acid analog,

[chemical structure]

[—NH-L₄-CO—], [—NH-L₄-SO₂—], or [—NH-L₄-];
[0352] each Rₐ₁ is independently alkyl, alkenyl, alkynyl, arylalkyl, cycloalkyl, cycloalkylalkyl, heteroalkyl, or heterocycloalkyl, any of which is unsubstituted or substituted; or H; or Rₐ₁ forms a macrocycle-forming linker L′ connected to the alpha position of one of the Dₐ or Eₐ amino acids; or together with Lₐ forms a ring that is unsubstituted or substituted;
[0353] each Rₐ₂ is independently alkyl, alkenyl, alkynyl, arylalkyl, cycloalkyl, cycloalkylalkyl, heteroalkyl, or heterocycloalkyl, any of which is unsubstituted or substituted; or H; or Rₐ₂ forms a macrocycle-forming linker L′ connected to the alpha position of one of the Dₐ or Eₐ amino acids; or together with Lₐ forms a ring that is unsubstituted or substituted;
[0354] each R_{b1} is independently alkyl, alkenyl, alkynyl, arylalkyl, cycloalkyl, cycloalkylalkyl, heteroalkyl, or heterocycloalkyl, any of which is unsubstituted or substituted; or H; or R_{b1} forms a macrocycle-forming linker L′ connected to the alpha position of one of the D_{b} amino acids; or together with L_{b} forms a ring that is unsubstituted or substituted;
[0355] each R₃ is independently alkyl, alkenyl, alkynyl, arylalkyl, heteroalkyl, cycloalkyl, heterocycloalkyl, cycloalkylalkyl, cycloaryl, or heterocycloaryl, any of which is unsubstituted or substituted, or H;
[0356] each Lₐ is independently a macrocycle-forming linker, and optionally forms a ring with Rₐ₁ or Rₐ₂ that is unsubstituted or substituted;
[0357] each L_{b} is independently a macrocycle-forming linker, and optionally forms a ring with R_{b1} that is unsubstituted or substituted;
[0358] each L′ is independently a macrocycle-forming linker;
[0359] each L₄ is independently alkylene, alkenylene, alkynylene, heteroalkylene, cycloalkylene, heterocycloalkylene, cycloarylene, heterocycloarylene, or [—R₄—K—R₄-]ₙ, any of which is unsubstituted or substituted;
[0360] each R₄ is independently alkylene, alkenylene, alkynylene, heteroalkylene, cycloalkylene, heterocycloalkylene, arylene, or heteroarylene, any of which is unsubstituted or substituted;
[0361] each K is independently O, S, SO, SO₂, CO, CO₂, OCO₂, NR₃, CONR₃, OCONR₃, OSO₂NR₃, NR_{3q}, CONR_{3q}, OCONR_{3q}, or OSO₂NR_{3q}, wherein each R_{3q} is independently a point of attachment to Rₐ₁, Rₐ₂, or R_{b1};
[0362] Rₐ₇ is alkyl, alkenyl, alkynyl, arylalkyl, cycloalkyl, heteroalkyl, cycloalkylalkyl, heterocycloalkyl, cycloaryl, or heterocycloaryl, any of which is unsubstituted or substituted; or H; or part of a cyclic structure with a Dₐ amino acid;
[0363] R_{b7} is alkyl, alkenyl, alkynyl, arylalkyl, cycloalkyl, heteroalkyl, cycloalkylalkyl, heterocycloalkyl, cycloaryl, or heterocycloaryl, any of which is unsubstituted or substituted; or H; or part of a cyclic structure with a D_{b} amino acid;
[0364] Rₐ₈ is alkyl, alkenyl, alkynyl, arylalkyl, cycloalkyl, heteroalkyl, cycloalkylalkyl, heterocycloalkyl, cycloaryl, or heterocycloaryl, any of which is unsubstituted or substituted; or H; or part of a cyclic structure with an Eₐ amino acid;
[0365] R_{b8} is alkyl, alkenyl, alkynyl, arylalkyl, cycloalkyl, heteroalkyl, cycloalkylalkyl, heterocycloalkyl, cycloaryl, or heterocycloaryl, any of which is unsubstituted or substituted; or H; or an amino acid sequence of 1-1000 amino acid residues;
[0366] each va and vb is independently an integer from 0-1000;
[0367] each wa and wb is independently an integer from 0-1000;
[0368] each ua and ub is independently 0, 1, 2, 3, 4, 5, 6, 7, 8, 9, or 10, wherein ua+ub is at least 1;
[0369] each xa and xb is independently 0, 1, 2, 3, 4, 5, 6, 7, 8, 9, or 10;
[0370] each ya and yb is independently 0, 1, 2, 3, 4, 5, 6, 7, 8, 9, or 10;
[0371] each za and zb is independently 0, 1, 2, 3, 4, 5, 6, 7, 8, 9, or 10; and
[0372] each n is independently 1, 2, 3, 4, or 5,
   or a pharmaceutically-acceptable salt thereof.

[0373] In some embodiments, the peptidomimetic macrocycle has the Formula (III) or Formula (IIIa):

[chemical structure]

wherein:
[0374] each Aₐ, Cₐ, Dₐ, Eₐ, A_{b}, C_{b}, and D_{b} is independently a natural or non-natural amino acid or an amino acid analogue;
[0375] each Bₐ and B_{b} is independently a natural or non-natural amino acid, amino acid analog,

[chemical structure]

[—NH-L₄-CO—], [—NH-L₄-SO₂—], or [—NH-L₄-];
[0376] each Rₐ₁ is independently alkyl, alkenyl, alkynyl, arylalkyl, cycloalkyl, cycloalkylalkyl, heteroalkyl, or heterocycloalkyl, any of which is unsubstituted or substituted; or H; or Rₐ₁ forms a macrocycle-forming linker L′ connected to the alpha position of one of the Dₐ or Eₐ amino acids; or together with Lₐ forms a ring that is unsubstituted or substituted;
[0377] each Rₐ₂ is independently alkyl, alkenyl, alkynyl, arylalkyl, cycloalkyl, cycloalkylalkyl, heteroalkyl, or heterocycloalkyl, any of which is unsubstituted or substituted; or H; or Rₐ₂ forms a macrocycle-forming linker L′ connected to the alpha position of one of the Dₐ or Eₐ amino acids; or together with Lₐ forms a ring that is unsubstituted or substituted;
[0378] each R_{b1} is independently alkyl, alkenyl, alkynyl, arylalkyl, cycloalkyl, cycloalkylalkyl, heteroalkyl, or heterocycloalkyl, any of which is unsubstituted or substituted; or H; or R_{b1} forms a macrocycle-forming linker L′ connected to the alpha position of one of the D_{b} amino acids; or together with L_{b} forms a ring that is unsubstituted or substituted;
[0379] each R₃ is independently alkyl, alkenyl, alkynyl, arylalkyl, heteroalkyl, cycloalkyl, heterocycloalkyl, cycloalkylalkyl, cycloaryl, or heterocycloaryl, any of which is unsubstituted or substituted with R₅, or H;
[0380] each Lₐ is independently a macrocycle-forming linker, and optionally forms a ring with Rₐ₁ or Rₐ₂ that is unsubstituted or substituted;
[0381] each L_{b} is independently a macrocycle-forming linker, and optionally forms a ring with R_{b1} that is unsubstituted or substituted;
[0382] each L′ is independently a macrocycle-forming linker;
[0383] each L₄ is independently alkylene, alkenylene, alkynylene, heteroalkylene, cycloalkylene, heterocycloalkylene, cycloarylene, heterocycloarylene, or [—R₄—K—R₄-]ₙ, any of which is unsubstituted or substituted with R₅;
[0384] each R₄ is independently alkylene, alkenylene, alkynylene, heteroalkylene, cycloalkylene, heterocycloalkylene, arylene, or heteroarylene, any of which is unsubstituted or substituted with R₅;
[0385] each K is independently O, S, SO, SO₂, CO, CO₂, OCO₂, NR₃, CONR₃, OCONR₃, OSO₂NR₃, NR_{3q}, CONR_{3q}, OCONR_{3q}, or OSO₂NR_{3q}, wherein each R_{3q} is independently a point of attachment to Rₐ₁, Rₐ₂, or R_{b1};
[0386] each R₅ is independently halogen, alkyl, —OR₆, —N(R₆)₂, —SR₆, —SOR₆, —SO₂R₆, —CO₂R₆, a fluorescent moiety, a radioisotope, or a therapeutic agent;
[0387] each R₆ is independently H, alkyl, alkenyl, alkynyl, arylalkyl, cycloalkylalkyl, heterocycloalkyl, a fluorescent moiety, a radioisotope or a therapeutic agent;
[0388] each Rₐ is independently alkyl, alkenyl, alkynyl, arylalkyl, cycloalkyl, heteroalkyl, cycloalkylalkyl, heterocycloalkyl, cycloaryl, or heterocycloaryl, any of which is unsubstituted or substituted with R₅; or H; or part of a cyclic structure with a Dₐ amino acid;
[0389] R_{b7} is alkyl, alkenyl, alkynyl, arylalkyl, cycloalkyl, heteroalkyl, cycloalkylalkyl, heterocycloalkyl, cycloaryl, or heterocycloaryl, any of which is unsubstituted or substituted with R₅; or H; or part of a cyclic structure with a D_{b} amino acid;
[0390] each Rₐ₈ is independently alkyl, alkenyl, alkynyl, arylalkyl, cycloalkyl, heteroalkyl, cycloalkylalkyl, heterocycloalkyl, cycloaryl, or heterocycloaryl, any of which is unsubstituted or substituted with R₅; or H; or part of a cyclic structure with an Eₐ amino acid;
[0391] R_{b8} is alkyl, alkenyl, alkynyl, arylalkyl, cycloalkyl, heteroalkyl, cycloalkylalkyl, heterocycloalkyl, cycloaryl, or heterocycloaryl, any of which is unsubstituted or substituted with R₅; or H; or an amino acid sequence of 1-1000 amino acid residues;
[0392] each va and vb is independently an integer from 0-1000;
[0393] each wa and wb is independently an integer from 0-1000;
[0394] each ua and ub is independently 0, 1, 2, 3, 4, 5, 6, 7, 8, 9, or 10, wherein ua+ub is at least 1;
[0395] each xa and xb is independently 0, 1, 2, 3, 4, 5, 6, 7, 8, 9, or 10;
[0396] each ya and yb is independently 0, 1, 2, 3, 4, 5, 6, 7, 8, 9, or 10;
[0397] each za and zb is independently 0, 1, 2, 3, 4, 5, 6, 7, 8, 9, or 10; and
[0398] each n is independently 1, 2, 3, 4, or 5,
   or a pharmaceutically-acceptable salt thereof.

[0399] In some embodiments, the peptidomimetic macrocycle of the invention has the formula defined above, wherein:
[0400] each Lₐ is independently a macrocycle-forming linker of the formula -L₁-L₂-, and optionally forms a ring with Rₐ₁ or Rₐ₂ that is unsubstituted or substituted;
[0401] each L_{b} is independently a macrocycle-forming linker of the formula -L₁-L₂-, and optionally forms a ring with R_{b1} that is unsubstituted or substituted;
[0402] each L′ is independently a macrocycle-forming linker of the formula -L₁-L₂-;
[0403] each L₁ and L₂ is independently alkylene, alkenylene, alkynylene, heteroalkylene, cycloalkylene, heterocycloalkylene, cycloarylene, heterocycloarylene, or [—R₄—K—R₄-]ₙ, any of which is unsubstituted or substituted with R₅;
[0404] each R₄ is independently alkylene, alkenylene, alkynylene, heteroalkylene, cycloalkylene, heterocycloalkylene, arylene, or heteroarylene, any of which is unsubstituted or substituted with R₅;
[0405] each K is independently O, S, SO, SO₂, CO, CO₂, OCO₂, NR₃, CONR₃, OCONR₃, OSO₂NR₃, NR_{3q}, CONR_{3q}, OCONR_{3q}, or OSO₂NR_{3q}, wherein each R_{3q} is independently a point of attachment to Rₐ₁, Rₐ₂, or R_{b1};
[0406] each R₅ is independently halogen, alkyl, —OR₆, —N(R₆)₂, —SR₆, —SOR₆, —SO₂R₆, —CO₂R₆, a fluorescent moiety, a radioisotope, or a therapeutic agent; and
[0407] each R₆ is independently H, alkyl, alkenyl, alkynyl, arylalkyl, cycloalkylalkyl, heterocycloalkyl, a fluorescent moiety, a radioisotope or a therapeutic agent,
   or a pharmaceutically-acceptable salt thereof.

[0408] In some embodiments, the peptidomimetic macrocycle has the formula defined above wherein one of Lₐ and L_{b} is a bis-thioether-containing macrocycle-forming linker. In some embodiments, one of Lₐ and L_{b} is a macrocycle-forming linker of the formula -L₁-S-L₂-S-L₃-.

[0409] In some embodiments, the peptidomimetic macrocycle has the formula defined above wherein one of Lₐ and L_{b} is a bis-sulfone-containing macrocycle-forming linker. In some embodiments, one of Lₐ and L_{b} is a macrocycle-forming linker of the formula -L₁-SO₂-L₂-SO₂-L₃-.

[0410] In some embodiments, the peptidomimetic macrocycle has the formula defined above wherein one of Lₐ and L_{b} is a bis-sulfoxide-containing macrocycle-forming linker. In some embodiments, one of Lₐ and L_{b} is a macrocycle-forming linker of the formula -L₁-S(O)-L₂-S(O)-L₃-.

[0411] In some embodiments, a peptidomimetic macrocycle of the invention comprises one or more secondary structures. In some embodiments, the peptidomimetic macrocycle comprises a secondary structure that is an α-helix. In some embodiments, the peptidomimetic macrocycle comprises a secondary structure that is a β-hairpin turn.

[0412] In some embodiments, uₐ is 0. In some embodiments, uₐ is 0, and L_{b} is a macrocycle-forming linker that crosslinks an α-helical secondary structure. In some embodiments, uₐ is 0, and L_{b} is a macrocycle-forming linker that crosslinks a β-hairpin secondary structure. In some embodiments, uₐ is 0, and L_{b} is a hydrocarbon-containing macrocycle-forming linker that crosslinks an α-helical secondary structure. In some embodiments, uₐ is 0, and L_{b} is a hydrocarbon-containing macrocycle-forming linker that crosslinks a β-hairpin secondary structure.

[0413] In some embodiments, u_{b} is 0. In some embodiments, u_{b} is 0, and Lₐ is a macrocycle-forming linker that crosslinks an α-helical secondary structure. In some embodiments, u_{b} is 0, and Lₐ is a macrocycle-forming linker that crosslinks a 3-hairpin secondary structure. In some embodiments, u_{b} is 0, and Lₐ is a hydrocarbon-containing macrocycle-forming linker that crosslinks an α-helical secondary structure. In some embodiments, u_{b} is 0, and Lₐ is a hydrocarbon-containing macrocycle-forming linker that crosslinks a 3-hairpin secondary structure.

[0414] In some embodiments, the peptidomimetic macrocycle comprises only α-helical secondary structures. In other embodiments, the peptidomimetic macrocycle comprises only β-hairpin secondary structures.

[0415] In other embodiments, the peptidomimetic macrocycle comprises a combination of secondary structures, wherein the secondary structures are α-helical and β-hairpin structures. In some embodiments, Lₐ and L_{b} are a combination of hydrocarbon-, triazole, or sulfur-containing macrocycle-forming linkers. In some embodiments, the peptidomimetic macrocycle comprises Lₐ and L_{b}, wherein Lₐ is a hydrocarbon-containing macrocycle-forming linker that crosslinks a β-hairpin structure, and L_{b} is a triazole-containing macrocycle-forming linker that crosslinks an α-helical structure. In some embodiments, the peptidomimetic macrocycle comprises Lₐ and L_{b}, wherein Lₐ is a hydrocarbon-containing macrocycle-forming linker that crosslinks an α-helical structure, and L_{b} is a triazole-containing macrocycle-forming linker that crosslinks a β-hairpin structure. In some embodiments, the peptidomimetic macrocycle comprises Lₐ and L_{b}, wherein Lₐ is a triazole-containing macrocycle-forming linker that crosslinks an α-helical structure, and L_{b} is a hydrocarbon-containing macrocycle-forming linker that crosslinks a β-hairpin structure. In some embodiments, the peptidomimetic macrocycle comprises Lₐ and L_{b}, wherein Lₐ is a triazole-containing macrocycle-forming linker that crosslinks a β-hairpin structure, and L_{b} is a hydrocarbon-containing macrocycle-forming linker that crosslinks an α-helical structure.

[0416] In some embodiments, uₐ+u_{b} is at least 1. In some embodiments, uₐ+u_{b}=2.

[0417] In some embodiments, uₐ is 1, u_{b} is 1, Lₐ is a triazole-containing macrocycle-forming linker that crosslinks an α-helical secondary structure, and L_{b} is a hydrocarbon-containing macrocycle-forming linker that crosslinks an α-helical structure. In some embodiments, uₐ is 1, u_{b} is 1, Lₐ is a triazole-containing macrocycle-forming linker that crosslinks an α-helical secondary structure, and L_{b} is a hydrocarbon-containing macrocycle-forming linker that crosslinks a β-hairpin structure. In some embodiments, uₐ is 1, u_{b} is 1, Lₐ is a triazole-containing macrocycle-forming linker that crosslinks a β-hairpin secondary structure, and L_{b} is a hydrocarbon-containing macrocycle-forming linker that crosslinks an α-helical structure. In some embodiments, uₐ is 1, u_{b} is 1, Lₐ is a triazole-containing macrocycle-forming linker that crosslinks a β-hairpin secondary structure, and L_{b} is a hydrocarbon-containing macrocycle-forming linker that crosslinks a β-hairpin structure.

[0418] In some embodiments, uₐ is 1, u_{b} is 1, Lₐ is a hydrocarbon-containing macrocycle-forming linker that crosslinks an α-helical secondary structure, and L_{b} is a triazole-containing macrocycle-forming linker that crosslinks an α-helical secondary structure. In some embodiments, uₐ is 1, u_{b} is 1, Lₐ is a hydrocarbon-containing macrocycle-forming linker that crosslinks an α-helical secondary structure, and L_{b} is a triazole-containing macrocycle-forming linker that crosslinks a β-hairpin secondary structure. In some embodiments, uₐ is 1, u_{b} is 1, Lₐ is a hydrocarbon-containing macrocycle-forming linker that crosslinks a β-hairpin secondary structure, and L_{b} is a triazole-containing macrocycle-forming linker that crosslinks an α-helical secondary structure. In some embodiments, uₐ is 1, u_{b} is 1, Lₐ is a hydrocarbon-containing macrocycle-forming linker that crosslinks a β-hairpin secondary structure, and L_{b} is a triazole-containing macrocycle-forming linker that crosslinks a β-hairpin secondary structure.

[0419] In some embodiments, uₐ is 1, u_{b} is 1, Lₐ is a hydrocarbon-containing macrocycle-forming linker with an α-helical secondary structure, and L_{b} is a sulfur-containing macrocycle-forming linker. In some embodiments, uₐ is 1, u_{b} is 1, Lₐ is a hydrocarbon-containing macrocycle-forming linker with a β-hairpin secondary structure, and L_{b} is a sulfur-containing macrocycle-forming linker.

[0420] In some embodiments, uₐ is 1, u_{b} is 1, Lₐ is a sulfur-containing macrocycle-forming linker, and L_{b} is a hydrocarbon-containing macrocycle-forming linker with an α-helical secondary structure. In some embodiments, uₐ is 1, u_{b} is 1, Lₐ is a sulfur-containing macrocycle-forming linker, and L_{b} is a hydrocarbon-containing macrocycle-forming linker with a β-hairpin secondary structure.

[0421] In some embodiments, uₐ is 1, u_{b} is 1, Lₐ is a hydrocarbon-containing macrocycle-forming linker that crosslinks an α-helical structure, and L_{b} is a hydrocarbon-containing macrocycle-forming linker that crosslinks an α-helical structure. In some embodiments, uₐ is 1, u_{b} is 1, Lₐ is a hydrocarbon-containing macrocycle-forming linker that crosslinks an α-helical structure, and L_{b} is a hydrocarbon-containing macrocycle-forming linker that crosslinks a β-hairpin structure. In some embodiments, uₐ is 1, u_{b} is 1, Lₐ is a hydrocarbon-containing macrocycle-forming linker that crosslinks a β-hairpin structure, and L_{b} is a hydrocarbon-containing macrocycle-forming linker that crosslinks an α-helical structure. In some embodiments, uₐ is 1, u_{b} is 1, Lₐ is a hydrocarbon-containing macrocycle-forming linker that crosslinks a β-hairpin structure, and L_{b} is a hydrocarbon-containing macrocycle-forming linker that crosslinks a β-hairpin structure.

[0422] In some embodiments, R_{b1} is H.

[0423] Unless otherwise stated, any compounds (including peptidomimetic macrocycles, macrocycle precursors, and other compositions) are also meant to encompass compounds which differ only in the presence of one or more isotopically enriched atoms. For example, compounds having the described structures except for the replacement of a hydrogen atom by deuterium or tritium, or the replacement of a carbon atom by ¹³C or ¹⁴C are contemplated.

[0424] In some embodiments, the compounds disclosed herein can contain unnatural proportions of atomic isotopes at one or more of atoms that constitute such compounds. For example, the compounds can be radiolabeled with radioactive isotopes, such as for example tritium (³H), iodine-125 (¹²⁵I) or carbon-14 (¹⁴C). In other embodiments, one or more carbon atoms is replaced with a silicon atom. All isotopic variations of the compounds disclosed herein, whether radioactive or not, are contemplated herein.

[0425] In some embodiments, the peptidomimetic macrocycle comprises an amino acid sequence that is at least 60%, at least 65%, at least 70%, at least 75%, at least 80%, at least 85%, at least 90%, or at least 95% identical to an amino acid sequence listed in Table 1, Table 1a, Table 1b, Table 1c, Table 2a, or Table 2b. In some embodiments, the peptidomimetic macrocycle comprises an amino acid sequence that is at least 60% identical to an amino acid sequence listed in Table 1, Table 1a, Table 1b, Table 1c, Table 2a, or Table 2b. In some embodiments, the peptidomimetic macrocycle comprises an amino acid sequence that is at least 65% identical to an amino acid sequence listed in Table 1, Table 1a, Table 1b, Table 1c, Table 2a, or Table 2b. In some embodiments, the peptidomimetic macrocycle comprises an amino acid sequence that is at least 70% identical to an amino acid sequence listed in Table 1, Table 1a, Table 1b, Table 1c, Table 2a, or Table 2b. In some embodiments, the peptidomimetic macrocycle comprises an amino acid sequence that is at least 75% identical to an amino acid sequence listed in Table 1, Table 1a, Table 1b, Table 1c, Table 2a, or Table 2b.

[0426] In some embodiments, the peptidomimetic macrocycle is at least 60%, at least 65%, at least 70%, at least 75%, at least 80%, at least 85%, at least 90%, or at least 95% identical to an amino acid sequence listed in Table 1, Table 1a, Table 1b, Table 1c, Table 2a, or Table 2b. In some embodiments, the peptidomimetic macrocycle is at least 60% identical to an amino acid sequence listed in Table 1, Table 1a, Table 1b, Table 1c, Table 2a, or Table 2b. In some embodiments, the peptidomimetic macrocycle is at least 65% identical to an amino acid sequence listed in Table 1, Table 1a, Table 1b, Table 1c, Table 2a, or Table 2b. In some embodiments, the peptidomimetic macrocycle is at least 70% identical to an amino acid sequence listed in Table 1, Table 1a, Table 1b, Table 1c, Table 2a, or Table 2b. In some embodiments, the peptidomimetic macrocycle is at least 75% identical to an amino acid sequence listed in Table 1, Table 1a, Table 1b, Table 1c, Table 2a, or Table 2b.

### Preparation of Peptidomimetic Macrocycles

[0427] Peptidomimetic macrocycles can be prepared by any of a variety of methods known in the art. For example, any of the residues indicated by “$” or “$r8” in Table 1, Table 1a, Table 1b, Table 1c, Table 2a, or Table 2b can be substituted with a residue capable of forming a crosslinker with a second residue in the same molecule or a precursor of such a residue.

[0428] α,α-Disubstituted amino acids and amino acid precursors can be employed in synthesis of the peptidomimetic macrocycle precursor polypeptides. For example, the “S5-olefin amino acid” is (S)-α-(2′-pentenyl) alanine and the “R8 olefin amino acid” is (R)-α-(2′-octenyl) alanine. Following incorporation of such amino acids into precursor polypeptides, the terminal olefins are reacted with a metathesis catalyst, leading to the formation of the peptidomimetic macrocycle. In various embodiments, the following amino acids can be employed in the synthesis of the peptidomimetic macrocycle:

[chemical structure]

[0429] In other embodiments, the peptidomimetic macrocycles are of Formula IV or IVa. In such embodiments, amino acid precursors are used containing an additional substituent R—at the alpha position. Such amino acids are incorporated into the macrocycle precursor at the desired positions, which can be at the positions where the crosslinker is substituted or, alternatively, elsewhere in the sequence of the macrocycle precursor. Cyclization of the precursor is then effected according to the indicated method.

### Pharmaceutically-Acceptable Salts

[0430] The invention provides the use of pharmaceutically-acceptable salts of any therapeutic compound described herein. Pharmaceutically-acceptable salts include, for example, acid-addition salts and base-addition salts. The acid that is added to the compound to form an acid-addition salt can be an organic acid or an inorganic acid. A base that is added to the compound to form a base-addition salt can be an organic base or an inorganic base. In some embodiments, a pharmaceutically-acceptable salt is a metal salt. In some embodiments, a pharmaceutically-acceptable salt is an ammonium salt.

[0431] Metal salts can arise from the addition of an inorganic base to a compound of the invention. The inorganic base consists of a metal cation paired with a basic counterion, such as, for example, hydroxide, carbonate, bicarbonate, or phosphate. The metal can be an alkali metal, alkaline earth metal, transition metal, or main group metal. In some embodiments, the metal is lithium, sodium, potassium, cesium, cerium, magnesium, manganese, iron, calcium, strontium, cobalt, titanium, aluminum, copper, cadmium, or zinc.

[0432] In some embodiments, a metal salt is a lithium salt, a sodium salt, a potassium salt, a cesium salt, a cerium salt, a magnesium salt, a manganese salt, an iron salt, a calcium salt, a strontium salt, a cobalt salt, a titanium salt, an aluminum salt, a copper salt, a cadmium salt, or a zinc salt.

[0433] Ammonium salts can arise from the addition of ammonia or an organic amine to a compound of the invention. In some embodiments, the organic amine is triethyl amine, diisopropyl amine, ethanol amine, diethanol amine, triethanol amine, morpholine, N-methylmorpholine, piperidine, N-methylpiperidine, N-ethylpiperidine, dibenzylamine, piperazine, pyridine, pyrrazole, pipyrrazole, imidazole, pyrazine, or pipyrazine.

[0434] In some embodiments, an ammonium salt is a triethyl amine salt, a diisopropyl amine salt, an ethanol amine salt, a diethanol amine salt, a triethanol amine salt, a morpholine salt, an N-methylmorpholine salt, a piperidine salt, an N-methylpiperidine salt, an N-ethylpiperidine salt, a dibenzylamine salt, a piperazine salt, a pyridine salt, a pyrrazole salt, a pipyrrazole salt, an imidazole salt, a pyrazine salt, or a pipyrazine salt.

[0435] Acid addition salts can arise from the addition of an acid to a compound of the invention. In some embodiments, the acid is organic. In some embodiments, the acid is inorganic. In some embodiments, the acid is hydrochloric acid, hydrobromic acid, hydroiodic acid, nitric acid, nitrous acid, sulfuric acid, sulfurous acid, a phosphoric acid, isonicotinic acid, lactic acid, salicylic acid, tartaric acid, ascorbic acid, gentisinic acid, gluconic acid, glucaronic acid, saccaric acid, formic acid, benzoic acid, glutamic acid, pantothenic acid, acetic acid, propionic acid, butyric acid, fumaric acid, succinic acid, methanesulfonic acid, ethanesulfonic acid, benzenesulfonic acid, p-toluenesulfonic acid, citric acid, oxalic acid, or maleic acid. Examples of suitable acid salts include acetate, adipate, benzoate, benzenesulfonate, butyrate, citrate, digluconate, dodecylsulfate, formate, fumarate, glycolate, hemisulfate, heptanoate, hexanoate, hydrochloride, hydrobromide, hydroiodide, lactate, maleate, malonate, methanesulfonate, 2-naphthalenesulfonate, nicotinate, nitrate, palmoate, phosphate, picrate, pivalate, propionate, salicylate, succinate, sulfate, tartrate, tosylate and undecanoate. Salts derived from appropriate bases include alkali metal (e.g., sodium), alkaline earth metal (e.g., magnesium), ammonium and N-(alkyl)₄⁺ salts.

[0436] In some embodiments, the salt is a hydrochloride salt, a hydrobromide salt, a hydroiodide salt, a nitrate salt, a nitrite salt, a sulfate salt, a sulfite salt, a phosphate salt, isonicotinate salt, a lactate salt, a salicylate salt, a tartrate salt, an ascorbate salt, a gentisinate salt, a gluconate salt, a glucaronate salt, a saccarate salt, a formate salt, a benzoate salt, a glutamate salt, a pantothenate salt, an acetate salt, a propionate salt, a butyrate salt, a fumarate salt, a succinate salt, a methanesulfonate (mesylate) salt, an ethanesulfonate salt, a benzenesulfonate salt, a p-toluenesulfonate salt, a citrate salt, an oxalate salt, or a maleate salt.

### Purity of Compounds of the Invention

[0437] Any compound herein can be purified. A compound herein can be least 1% pure, at least 2% pure, at least 3% pure, at least 4% pure, at least 5% pure, at least 6% pure, at least 7% pure, at least 8% pure, at least 9% pure, at least 10% pure, at least 11% pure, at least 12% pure, at least 13% pure, at least 14% pure, at least 15% pure, at least 16% pure, at least 17% pure, at least 18% pure, at least 19% pure, at least 20% pure, at least 21% pure, at least 22% pure, at least 23% pure, at least 24% pure, at least 25% pure, at least 26% pure, at least 27% pure, at least 28% pure, at least 29% pure, at least 30% pure, at least 31% pure, at least 32% pure, at least 33% pure, at least 34% pure, at least 35% pure, at least 36% pure, at least 37% pure, at least 38% pure, at least 39% pure, at least 40% pure, at least 41% pure, at least 42% pure, at least 43% pure, at least 44% pure, at least 45% pure, at least 46% pure, at least 47% pure, at least 48% pure, at least 49% pure, at least 50% pure, at least 51% pure, at least 52% pure, at least 53% pure, at least 54% pure, at least 55% pure, at least 56% pure, at least 57% pure, at least 58% pure, at least 59% pure, at least 60% pure, at least 61% pure, at least 62% pure, at least 63% pure, at least 64% pure, at least 65% pure, at least 66% pure, at least 67% pure, at least 68% pure, at least 69% pure, at least 70% pure, at least 71% pure, at least 72% pure, at least 73% pure, at least 74% pure, at least 75% pure, at least 76% pure, at least 77% pure, at least 78% pure, at least 79% pure, at least 80% pure, at least 81% pure, at least 82% pure, at least 83% pure, at least 84% pure, at least 85% pure, at least 86% pure, at least 87% pure, at least 88% pure, at least 89% pure, at least 90% pure, at least 91% pure, at least 92% pure, at least 93% pure, at least 94% pure, at least 95% pure, at least 96% pure, at least 97% pure, at least 98% pure, at least 99% pure, at least 99.1% pure, at least 99.2% pure, at least 99.3% pure, at least 99.4% pure, at least 99.5% pure, at least 99.6% pure, at least 99.7% pure, at least 99.8% pure, or at least 99.9% pure.

### Formulation and Administration

### Pharmaceutical Compositions

[0438] Pharmaceutical compositions disclosed herein include peptidomimetic macrocycles and pharmaceutically-acceptable derivatives or prodrugs thereof. A “pharmaceutically-acceptable derivative” means any pharmaceutically-acceptable salt, ester, salt of an ester, pro-drug or other derivative of a compound disclosed herein which, upon administration to a recipient, is capable of providing (directly or indirectly) a compound disclosed herein. Particularly favored pharmaceutically-acceptable derivatives are those that increase the bioavailability of the compounds when administered to a mammal (e.g., by increasing absorption into the blood of an orally administered compound) or which increases delivery of the active compound to a biological compartment (e.g., the brain or lymphatic system) relative to the parent species. Some pharmaceutically-acceptable derivatives include a chemical group which increases aqueous solubility or active transport across the gastrointestinal mucosa.

[0439] In some embodiments, peptidomimetic macrocycles are modified by covalently or non-covalently joining appropriate functional groups to enhance selective biological properties. Such modifications include those which increase biological penetration into a given biological compartment (e.g., blood, lymphatic system, central nervous system), increase oral availability, increase solubility to allow administration by injection, alter metabolism, and alter rate of excretion.

[0440] For preparing pharmaceutical compositions from the compounds disclosed herein, pharmaceutically-acceptable carriers include either solid or liquid carriers. Solid form preparations include powders, tablets, pills, capsules, cachets, suppositories, and dispersible granules. A solid carrier can be one or more substances, which also acts as diluents, flavoring agents, binders, preservatives, tablet disintegrating agents, or an encapsulating material.

[0441] In powders, the carrier is a finely divided solid, which is in a mixture with the finely divided active component. In tablets, the active component is mixed with the carrier having the necessary binding properties in suitable proportions and compacted in the shape and size desired.

[0442] Suitable solid excipients are carbohydrate or protein fillers include, but are not limited to sugars, including lactose, sucrose, mannitol, or sorbitol; starch from corn, wheat, rice, potato, or other plants; cellulose such as methyl cellulose, hydroxypropylmethyl-cellulose, or sodium carboxymethylcellulose; and gums including arabic and tragacanth; as well as proteins such as gelatin and collagen. If desired, disintegrating or solubilizing agents are added, such as the crosslinked polyvinyl pyrrolidone, agar, alginic acid, or a salt thereof, such as sodium alginate.

[0443] Liquid form preparations include solutions, suspensions, and emulsions, for example, water or water/propylene glycol solutions. For parenteral injection, liquid preparations can be formulated in solution in aqueous polyethylene glycol solution.

[0444] The pharmaceutical preparation can be in unit dosage form. In such form the preparation is subdivided into unit doses containing appropriate quantities of the active component. The unit dosage form can be a packaged preparation, the package containing discrete quantities of preparation, such as packaged tablets, capsules, and powders in vials or ampoules. Also, the unit dosage form can be a capsule, tablet, cachet, or lozenge itself, or it can be the appropriate number of any of these in packaged form.

[0445] When one or more compositions disclosed herein comprise a combination of a peptidomimetic macrocycle and one or more additional therapeutic or prophylactic agents, both the compound and the additional agent should be present at dosage levels of between about 1 to 100%, and more preferably between about 5 to 95% of the dosage normally administered in a monotherapy regimen. In some embodiments, the additional agents are administered separately, as part of a multiple dose regimen, from one or more compounds disclosed herein. Alternatively, those agents are part of a single dosage form, mixed together with the compounds disclosed herein in a single composition.

### Mode of Administration

[0446] An effective amount of a peptidomimetic macrocycles of the disclosure can be administered in either single or multiple doses by any of the accepted modes of administration. In some embodiments, the peptidomimetic macrocycles of the disclosure are administered parenterally, for example, by subcutaneous, intramuscular, intrathecal, intravenous or epidural injection. For example, the peptidomimetic macrocycle is administered intravenously, intra-arterially, subcutaneously or by infusion. In some examples, the peptidomimetic macrocycle is administered intravenously. In some examples, the peptidomimetic macrocycle is administered intra-arterially.

[0447] Regardless of the route of administration selected, the peptidomimetic macrocycles of the present disclosure, and/or the pharmaceutical compositions of the present disclosure, are formulated into pharmaceutically-acceptable dosage forms. The peptidomimetic macrocycles according to the disclosure can be formulated for administration in any convenient way for use in human or veterinary medicine, by analogy with other pharmaceuticals.

[0448] In one aspect, the disclosure provides pharmaceutical formulation comprising a therapeutically-effective amount of one or more of the peptidomimetic macrocycles described above, formulated together with one or more pharmaceutically-acceptable carriers (additives) and/or diluents. In one embodiment, one or more of the peptidomimetic macrocycles described herein are formulated for parenteral administration for parenteral administration, one or more peptidomimetic macrocycles disclosed herein can be formulated as aqueous or non-aqueous solutions, dispersions, suspensions or emulsions or sterile powders which can be reconstituted into sterile injectable solutions or dispersions just prior to use. Such formulations can comprise sugars, alcohols, antioxidants, buffers, bacteriostats, solutes which render the formulation isotonic with the blood of the intended recipient or suspending or thickening agents. These compositions can also contain adjuvants such as preservatives, wetting agents, emulsifying agents and dispersing agents. Prevention of the action of microorganisms upon the subject compounds can be ensured by the inclusion of various antibacterial and antifungal agents, for example, paraben, chlorobutanol, phenol sorbic acid, and the like. It can also be desirable to include isotonic agents, such as sugars, sodium chloride, and the like into the compositions. In addition, prolonged absorption of the injectable pharmaceutical form can be brought about by the inclusion of agents which delay absorption such as aluminum monostearate and gelatin. If desired the formulation can be diluted prior to use with, for example, an isotonic saline solution or a dextrose solution. In some examples, the peptidomimetic macrocycle is formulated as an aqueous solution and is administered intravenously.

### Amount and Frequency of Administration

[0449] Dosing can be determined using various techniques. The selected dosage level can depend upon a variety of factors including the activity of the particular peptidomimetic macrocycle employed, the route of administration, the time of administration, the rate of excretion or metabolism of the particular peptidomimetic macrocycle being employed, the duration of the treatment, other drugs, compounds and/or materials used in combination with the particular peptidomimetic macrocycle employed, the age, sex, weight, condition, general health and prior medical history of the patient being treated, and like factors well known in the medical arts. The dosage values can also vary with the severity of the condition to be alleviated. For any particular subject, specific dosage regimens can be adjusted over time according to the individual need and the professional judgment of the person administering or supervising the administration of the compositions.

[0450] A physician or veterinarian can prescribe the effective amount of the pharmaceutical composition required. For example, the physician or veterinarian could start doses of the compounds of the disclosure employed in the pharmaceutical composition at levels lower than that required in order to achieve the desired therapeutic effect and gradually increase the dosage until the desired effect is achieved.

[0451] In some embodiments, a suitable daily dose of a peptidomimetic macrocycle of the disclosure can be that amount of the peptidomimetic macrocycle which is the lowest dose effective to produce a therapeutic effect. Such an effective dose will generally depend upon the factors described above. The precise time of administration and amount of any particular peptidomimetic macrocycle that will yield the most effective treatment in a given patient will depend upon the activity, pharmacokinetics, and bioavailability of a particular peptidomimetic macrocycle, physiological condition of the patient (including age, sex, disease type and stage, general physical condition, responsiveness to a given dosage and type of medication), route of administration, and the like.

[0452] Dosage can be based on the amount of the peptidomimetic macrocycle per kg body weight of the patient. Alternatively, the dosage of the subject disclosure can be determined by reference to the plasma concentrations of the peptidomimetic macrocycle. For example, the maximum plasma concentration (Cₘₐₓ) and the area under the plasma concentration-time curve from time 0 to infinity (AUC) can be used.

[0453] The amount of the peptidomimetic macrocycle that is administered to a subject can be from about 1 μg/kg, 25 μg/kg, 50 μg/kg, 75 μg/kg, 100 i g/kg, 125 μg/kg, 150 μg/kg, 175 μg/kg, 200 μg/kg, 225 μg/kg, 250 μg/kg, 275 μg/kg, 300 μg/kg, 325 μg/kg, 350 μg/kg, 375 μg/kg, 400 μg/kg, 425 μg/kg, 450 μg/kg, 475 μg/kg, 500 μg/kg, 525 μg/kg, 550 μg/kg, 575 μg/kg, 600 μg/kg, 625 μg/kg, 650 μg/kg, 675 μg/kg, 700 μg/kg, 725 μg/kg, 750 μg/kg, 775 μg/kg, 800 μg/kg, 825 μg/kg, 850 μg/kg, 875 μg/kg, 900 μg/kg, 925 μg/kg, 950 μg/kg, 975 μg/kg, 1 mg/kg, 2.5 mg/kg, 5 mg/kg, 10 mg/kg, 15 mg/kg, 20 mg/kg, 25 mg/kg, 30 mg/kg, 35 mg/kg, 40 mg/kg, 45 mg/kg, 50 mg/kg, 60 mg/kg, 70 mg/kg, 80 mg/kg, 90 mg/kg, or 100 mg/kg per body weight of the subject.

[0454] The amount of the peptidomimetic macrocycle that is administered to a subject can be from about 0.01 mg/kg to about 100 mg/kg body weight of the subject. In some embodiments, the amount of the peptidomimetic macrocycle administered is about 0.01-10 mg/kg, about 0.01-20 mg/kg, about 0.01-50 mg/kg, about 0.1-10 mg/kg, about 0.1-20 mg/kg, about 0.1-50 mg/kg, about 0.1-100 mg/kg, about 0.5-10 mg/kg, about 0.5-20 mg/kg, about 0.5-50 mg/kg, about 0.5-100 mg/kg, about 1-10 mg/kg, about 1-20 mg/kg, about 1-50 mg/kg, or about 1-100 mg/kg body weight of the human subject. In some embodiments, the amount of the peptidomimetic macrocycle administered is about 0.1 mg/kg, 0.2 mg/kg, 0.3 mg/kg, 0.4 mg/kg, 0.5 mg/kg, 0.6 mg/kg, 0.7 mg/kg, 0.8 mg/kg, 0.9 mg/kg, 10 mg/kg, 11 mg/kg, 12 mg/kg, 13 mg/kg, 14 mg/kg, 15 mg/kg, 16 mg/kg, 17 mg/kg, 18 mg/kg, 19 mg/kg, or 20 mg/kg body weight of the subject. In some embodiments, the amount of the peptidomimetic macrocycle administered is about 5 mg/kg. In some embodiments, the amount of the peptidomimetic macrocycle administered is about 10 mg/kg. In some embodiments, the amount of the peptidomimetic macrocycle administered is about 15 mg/kg.

[0455] In some embodiments, the amount of the peptidomimetic macrocycle administered is about 0.16 mg, about 0.32 mg, about 0.64 mg, about 1.28 mg, about 3.56 mg, about 7.12 mg, about 14.24 mg, or about 20 mg per kilogram body weight of the subject. In some examples the amount of the peptidomimetic macrocycle administered is about 0.16 mg per kilogram body weight of the subject. In some examples the amount of the peptidomimetic macrocycle administered is about 0.32 mg per kilogram body weight of the subject. In some examples the amount of the peptidomimetic macrocycle administered is about 0.64 mg per kilogram body weight of the subject. In some examples the amount of the peptidomimetic macrocycle administered is about 1.28 mg per kilogram body weight of the subject. In some examples the amount of the peptidomimetic macrocycle administered is about 3.56 mg per kilogram body weight of the subject. In some examples the amount of the peptidomimetic macrocycle administered is about 7.12 mg per kilogram body weight of the subject. In some examples the amount of the peptidomimetic macrocycle administered is about 14.24 mg per kilogram body weight of the subject.

[0456] In some embodiments, a pharmaceutically-acceptable amount of a peptidomimetic macrocycle is administered to a subject 1, 2, 3, 4, 5, 6, 7, 8, 9, 10, 11, 12, 13, or 14 times a week. In some embodiments about 0.5-about 20 mg or about 0.5-about 10 mg of the peptidomimetic macrocycle per kilogram body weight of the human subject is administered once a week. For example about 0.5-about 1 mg, about 0.5-about 5 mg, about 0.5-about 10 mg, about 0.5-about 15 mg, about 1-about 5 mg, about 1-about 10 mg, about 1-about 15 mg, about 1-about 20 mg, about 5-about 10 mg, about 1-about 15 mg, about 5-about 20 mg, about 10-about 15 mg, about 10-about 20 mg, or about 15-about 20 mg of the peptidomimetic macrocycle per kilogram body weight of the human subject is administered once a week. In some examples about 1 mg, about 1.25 mg, about 1.5 mg, about 1.75 mg, about 2 mg, about 2.25 mg, about 2.5 mg, about 2.75 mg, about 3 mg, about 3.25 mg, about 3.5 mg, about 3.75 mg, about 4 mg, about 4.25 mg, about 4.5 mg, about 4.75 mg, about 5 mg, about 5.25 mg, about 5.5 mg, about 5.75 mg, about 6 mg, about 6.25 mg, about 6.5 mg, about 6.75 mg, about 7 mg, about 7.25 mg, about 7.5 mg, about 7.75 mg, about 8 mg, about 8.25 mg, about 8.5 mg, about 8.75 mg, about 9 mg, about 9.25 mg, about 9.5 mg, about 9.75 mg, about 10 mg, about 10.25 mg, about 10.5 mg, about 10.75 mg, about 11 mg, about 11.25 mg, about 11.5 mg, about 11.75 mg, about 12 mg, about 12.25 mg, about 12.5 mg, about 12.75 mg, about 13 mg, about 13.25 mg, about 13.5 mg, about 13.75 mg, about 14 mg, about 14.25 mg, about 14.5 mg, about 14.75 mg, about 15 mg, about 15.25 mg, about 15.5 mg, about 15.75 mg, about 16 mg, about 16.5 mg, about 17 mg, about 17.5 mg, about 18 mg, about 18.5 mg, about 19 mg, about 19.5 mg, or about 20 mg of the peptidomimetic macrocycle per kilogram body weight of the human subject is administered once a week. In some examples, the amount of the peptidomimetic macrocycle administered is about 1.25 mg, about 2.5 mg, about 5 mg, about 10 mg, or about 20 mg per kilogram body weight of the human subject and the peptidomimetic macrocycle is administered once a week. In some examples, the amount of the peptidomimetic macrocycle administered is about 1.25 mg, about 2.5 mg, about 5 mg or about 10 mg per kilogram body weight of the human subject and the peptidomimetic macrocycle is administered once a week.

[0457] In some embodiments about 0.5-about 20 mg or about 0.5-about 10 mg of the peptidomimetic macrocycle per kilogram body weight of the human subject is administered two times a week. For example about 0.5-about 1 mg, about 0.5-about 5 mg, about 0.5-about 10 mg, about 0.5-about 15 mg, about 1-about 5 mg, about 1-about 10 mg, about 1-about 15 mg, about 1-about 20 mg, about 5-about 10 mg, about 1-about 15 mg, about 5-about 20 mg, about 10-about 15 mg, about 10-about 20 mg, or about 15-about 20 mg of the peptidomimetic macrocycle per kilogram body weight of the human subject is administered about twice a week. In some examples about 1 mg, about 1.25 mg, about 1.5 mg, about 1.75 mg, about 2 mg, about 2.25 mg, about 2.5 mg, about 2.75 mg, about 3 mg, about 3.25 mg, about 3.5 mg, about 3.75 mg, about 4 mg, about 4.25 mg, about 4.5 mg, about 4.75 mg, about 5 mg, about 5.25 mg, about 5.5 mg, about 5.75 mg, about 6 mg, about 6.25 mg, about 6.5 mg, about 6.75 mg, about 7 mg, about 7.25 mg, about 7.5 mg, about 7.75 mg, about 8 mg, about 8.25 mg, about 8.5 mg, about 8.75 mg, about 9 mg, about 9.25 mg, about 9.5 mg, about 9.75 mg, about 10 mg, about 10.25 mg, about 10.5 mg, about 10.75 mg, about 11 mg, about 11.25 mg, about 11.5 mg, about 11.75 mg, about 12 mg, about 12.25 mg, about 12.5 mg, about 12.75 mg, about 13 mg, about 13.25 mg, about 13.5 mg, about 13.75 mg, about 14 mg, about 14.25 mg, about 14.5 mg, about 14.75 mg, about 15 mg, about 15.25 mg, about 15.5 mg, about 15.75 mg, about 16 mg, about 16.5 mg, about 17 mg, about 17.5 mg, about 18 mg, about 18.5 mg, about 19 mg, about 19.5 mg, or about 20 mg of the peptidomimetic macrocycle per kilogram body weight of the human subject is administered two times a week. In some examples, the amount of the peptidomimetic macrocycle administered is about 1.25 mg, about 2.5 mg, about 5 mg, about 10 mg, or about 20 mg per kilogram body weight of the human subject and the peptidomimetic macrocycle is administered two times a week. In some examples, the amount of the peptidomimetic macrocycle administered is about 1.25 mg, about 2.5 mg, about 5 mg or about 10 mg per kilogram body weight of the human subject and the peptidomimetic macrocycle is administered two times a week.

[0458] In some embodiments about 0.5-about 20 mg or about 0.5-about 10 mg of the peptidomimetic macrocycle per kilogram body weight of the human subject is administered 3, 4, 5, 6, or 7 times a week. For example, about 0.5-about 1 mg, about 0.5-about 5 mg, about 0.5-about 10 mg, about 0.5-about 15 mg, about 1-about 5 mg, about 1-about 10 mg, about 1-about 15 mg, about 1-about 20 mg, about 5-about 10 mg, about 1-about 15 mg, about 5-about 20 mg, about 10-about 15 mg, about 10-about 20 mg, or about 15-about 20 mg of the peptidomimetic macrocycle per kilogram body weight of the human subject is administered 3, 4, 5, 6, or 7 times a week. In some examples about 1 mg, about 1.25 mg, about 1.5 mg, about 1.75 mg, about 2 mg, about 2.25 mg, about 2.5 mg, about 2.75 mg, about 3 mg, about 3.25 mg, about 3.5 mg, about 3.75 mg, about 4 mg, about 4.25 mg, about 4.5 mg, about 4.75 mg, about 5 mg, about 5.25 mg, about 5.5 mg, about 5.75 mg, about 6 mg, about 6.25 mg, about 6.5 mg, about 6.75 mg, about 7 mg, about 7.25 mg, about 7.5 mg, about 7.75 mg, about 8 mg, about 8.25 mg, about 8.5 mg, about 8.75 mg, about 9 mg, about 9.25 mg, about 9.5 mg, about 9.75 mg, about 10 mg, about 10.25 mg, about 10.5 mg, about 10.75 mg, about 11 mg, about 11.25 mg, about 11.5 mg, about 11.75 mg, about 12 mg, about 12.25 mg, about 12.5 mg, about 12.75 mg, about 13 mg, about 13.25 mg, about 13.5 mg, about 13.75 mg, about 14 mg, about 14.25 mg, about 14.5 mg, about 14.75 mg, about 15 mg, about 15.25 mg, about 15.5 mg, about 15.75 mg, about 16 mg, about 16.5 mg, about 17 mg, about 17.5 mg, about 18 mg, about 18.5 mg, about 19 mg, about 19.5 mg, or about 20 mg of the peptidomimetic macrocycle per kilogram body weight of the human subject is administered 3, 4, 5, 6, or 7 times a week. In some examples, the amount of the peptidomimetic macrocycle administered is about 1.25 mg, about 2.5 mg, about 5 mg, about 10 mg, or about 20 mg per kilogram body weight of the human subject and the peptidomimetic macrocycle is administered 3, 4, 5, 6, or 7 times a week. In some examples, the amount of the peptidomimetic macrocycle administered is about 1.25 mg, about 2.5 mg, about 5 mg, or about 10 mg per kilogram body weight of the human subject and the peptidomimetic macrocycle is administered 3, 4, 5, 6, or 7 times a week.

[0459] In some embodiments, a pharmaceutically-acceptable amount of a peptidomimetic macrocycle is administered to a subject once every 1, 2, 3, 4, 5, 6, 7, or 8 weeks. In some embodiments, about 0.5-about 20 mg or about 0.5-about 10 mg of the peptidomimetic macrocycle per kilogram body weight of the human subject is administered once every 2, 3, or 4 weeks. For example, about 0.5-about 1 mg, about 0.5-about 5 mg, about 0.5-about 10 mg, about 0.5-about 15 mg, about 1-about 5 mg, about 1-about 10 mg, about 1-about 15 mg, about 1-about 20 mg, about 5-about 10 mg, about 1-about 15 mg, about 5-about 20 mg, about 10-about 15 mg, about 10-about 20 mg, or about 15-about 20 mg of the peptidomimetic macrocycle per kilogram body weight of the human subject is administrated 3, 4, 5, 6, or 7 once every 2 or 3 week. In some examples about 1 mg, about 1.25 mg, about 1.5 mg, about 1.75 mg, about 2 mg, about 2.25 mg, about 2.5 mg, about 2.75 mg, about 3 mg, about 3.25 mg, about 3.5 mg, about 3.75 mg, about 4 mg, about 4.25 mg, about 4.5 mg, about 4.75 mg, about 5 mg, about 5.25 mg, about 5.5 mg, about 5.75 mg, about 6 mg, about 6.25 mg, about 6.5 mg, about 6.75 mg, about 7 mg, about 7.25 mg, about 7.5 mg, about 7.75 mg, about 8 mg, about 8.25 mg, about 8.5 mg, about 8.75 mg, about 9 mg, about 9.25 mg, about 9.5 mg, about 9.75 mg, about 10 mg, about 10.25 mg, about 10.5 mg, about 10.75 mg, about 11 mg, about 11.25 mg, about 11.5 mg, about 11.75 mg, about 12 mg, about 12.25 mg, about 12.5 mg, about 12.75 mg, about 13 mg, about 13.25 mg, about 13.5 mg, about 13.75 mg, about 14 mg, about 14.25 mg, about 14.5 mg, about 14.75 mg, about 15 mg, about 15.25 mg, about 15.5 mg, about 15.75 mg, about 16 mg, about 16.5 mg, about 17 mg, about 17.5 mg, about 18 mg, about 18.5 mg, about 19 mg, about 19.5 mg, or about 20 mg of the peptidomimetic macrocycle per kilogram body weight of the human subject is administered once every 2 or 3 weeks. In some examples, the amount of the peptidomimetic macrocycle administered is about 1.25 mg, about 2.5 mg, about 5 mg, about 10 mg, or about 20 mg per kilogram body weight of the human subject and the peptidomimetic macrocycle is administered once every 2 weeks. In some examples, the amount of the peptidomimetic macrocycle administered is about 1.25 mg, about 2.5 mg, about 5 mg or about 10 mg per kilogram body weight of the human subject and the peptidomimetic macrocycle is administered once every 2 weeks. In some examples, the amount of the peptidomimetic macrocycle administered is about 1.25 mg, about 2.5 mg, about 5 mg, about 10 mg, or about 20 mg per kilogram body weight of the human subject and the peptidomimetic macrocycle is administered once every 3 weeks. In some examples, the amount of the peptidomimetic macrocycle administered is about 1.25 mg, about 2.5 mg, about 5 mg, or about 10 mg per kilogram body weight of the human subject and the peptidomimetic macrocycle is administered once every 3 weeks.

[0460] In some embodiments, a pharmaceutically-acceptable amount of a peptidomimetic macrocycle is administered to a subject gradually over a period of time. In some embodiments, an amount of a peptidomimetic macrocycle can be administered to a subject gradually over a period of from about 0.1 h to about 24 h. In some embodiments, an amount of a peptidomimetic macrocycle can be administered to a subject over a period of about 0.1 h, about 0.2 h, about 0.3 h, about 0.4 h, about 0.5 h, about 0.6 h, about 0.7 h, about 0.8 h, about 0.9 h, about 1 h, about 1.5 h, about 2 h, about 2.5 h, about 3 h, about 3.5 h, about 4 h, about 4.5 h, about 5 h, about 5.5 h, about 6 h, about 6.5 h, about 7 h, about 7.5 h, about 8 h, about 8.5 h, about 9 h, about 9.5 h, about 10 h, about 10.5 h, about 11 h, about 11.5 h, about 12 h, about 12.5 h, about 13 h, about 13.5 h, about 14 h, about 14.5 h, about 15 h, about 15.5 h, about 16 h, about 16.5 h, about 17 h, about 17.5 h, about 18 h, about 18.5 h, about 19 h, about 19.5 h, about 20 h, about 20.5 h, about 21 h, about 21.5 h, about 22 h, about 22.5 h, about 23 h, about 23.5 h, or about 24 h. In some embodiments, a pharmaceutically-acceptable amount of a peptidomimetic macrocycle is administered gradually over a period of about 0.5 h. In some embodiments, a pharmaceutically-acceptable amount of a peptidomimetic macrocycle is administered gradually over a period of about 1 h. In some embodiments, a pharmaceutically-acceptable amount of a peptidomimetic macrocycle is administered gradually over a period of about 1.5 h.

[0461] Administration of the peptidomimetic macrocycles can continue for as long as clinically necessary. In some embodiments, a peptidomimetic macrocycle of the disclosure can be administered for more than 1 day, more than 1 week, more than 1 month, more than 2 months, more than 3 months, more than 4 months, more than 5 months, more than 6 months, more than 7 months, more than 8 months, more than 9 months, more than 10 months, more than 11 months, more than 12 months, more than 13 months, more than 14 months, more than 15 months, more than 16 months, more than 17 months, more than 18 months, more than 19 months, more than 20 months, more than 21 months, more than 22 months, more than 23 months, or more than 24 months. In some embodiments, one or more peptidomimetic macrocycle of the disclosure is administered for less than 1 week, less than 1 month, less than 2 months, less than 3 months, less than 4 months, less than 5 months, less than 6 months, less than 7 months, less than 8 months, less than 9 months, less than 10 months, less than 11 months, less than 12 months, less than 13 months, less than 14 months, less than 15 months, less than 16 months, less than 17 months, less than 18 months, less than 19 months, less than 20 months, less than 21 months, less than 22 months, less than 23 months, or less than 24 months.

[0462] In some embodiments, a peptidomimetic macrocycle can be administered to a subject 1, 2, 3, 4, 5, 6, 7, 8, 9, 10, 11, 12, 13, 14, 15, 16, 17, 18, 19, or 20 times over a treatment cycle. In some embodiments a peptidomimetic macrocycle can be administered to a subject 2, 4, 6, or 8 times over a treatment cycle. In some embodiments, a peptidomimetic macrocycle can be administered to a subject 4 times over a treatment cycle. In some embodiments, a treatment cycle is 7 days, 14 days, 21 days, or 28 days long. In some embodiments, a treatment cycle is 21 days long. In some embodiments, a treatment cycle is 28 days long.

[0463] In some embodiments, a peptidomimetic macrocycle is administered on day 1, 8, 15 and 28 of a 28 day cycle. In some embodiments, the peptidomimetic macrocycle is administered on day 1, 8, 15 and 28 of a 28 day cycle and administration is continued for two cycles. In some embodiments, the peptidomimetic macrocycle is administered on day 1, 8, 15 and 28 of a 28 day cycle and administration is continued for three cycles. In some embodiments, the peptidomimetic macrocycle is administered on day 1, 8, 15 and 28 of a 28 day cycle and administration is continued for 4, 5, 6, 7, 8, 9, 10, or more than 10 cycles.

[0464] In some embodiments, the peptidomimetic macrocycle is administered on day 1, 8, 11 and 21 of a 21-day cycle. In some embodiments, the peptidomimetic macrocycle is administered on day 1, 8, 11 and 21 of a 21-day cycle and administration is continued for two cycles. In some embodiments, the peptidomimetic macrocycle is administered on day 1, 8, 11 and 21 of a 21-day cycle and administration is continued for three cycles. In some embodiments, the peptidomimetic macrocycle is administered on day 1, 8, 11 and 21 of a 21-day cycle and administration is continued for 4, 5, 6, 7, 8, 9, 10, or more than 10 cycles.

[0465] In some embodiments, one or more peptidomimetic macrocycle of the disclosure is administered chronically on an ongoing basis. In some embodiments administration of one or more peptidomimetic macrocycle of the disclosure is continued until documentation of disease progression, unacceptable toxicity, or patient or physician decision to discontinue administration.

[0466] In some embodiments, the compounds of the invention can be used to treat one condition. In some embodiments, the compounds of the invention can be used to treat two conditions. In some embodiments, the compounds of the invention can be used to treat three conditions. In some embodiments, the compounds of the invention can be used to treat four conditions. In some embodiments, the compounds of the invention can be used to treat five conditions.

### Methods of Use

[0467] In one aspect, provided herein are novel peptidomimetic macrocycles that are useful in competitive binding assays to identify agents which bind to the natural ligand(s) of the proteins or peptides upon which the peptidomimetic macrocycles are modeled. For example, in the p53/MDMX system, labeled peptidomimetic macrocycles based on p53 can be used in a MDMX binding assay along with small molecules that competitively bind to MDMX. Competitive binding studies allow for rapid in vitro evaluation and determination of drug candidates specific for the p53/MDMX system. Such binding studies can be performed with any of the peptidomimetic macrocycles disclosed herein and their binding partners. Further provided are methods for the generation of antibodies against the peptidomimetic macrocycles. In some embodiments, these antibodies specifically bind both the peptidomimetic macrocycle and the precursor peptides, such as p53, to which the peptidomimetic macrocycles are related. Such antibodies, for example, disrupt the native protein-protein interaction, for example, binding between p53 and MDMX.

[0468] In other aspects, provided herein are both prophylactic and therapeutic methods of treating a subject at risk of (or susceptible to) a disorder or having a disorder associated with aberrant (e.g., insufficient or excessive) expression or activity of the molecules including p53, MDM2 or MDMX.

[0469] In another embodiment, a disorder is caused, at least in part, by an abnormal level of p53 or MDM2 or MDMX, (e.g., over or under expression), or by the presence of p53 or MDM2 or MDMX exhibiting abnormal activity. As such, the reduction in the level and/or activity of p53 or MDM2 or MDMX, or the enhancement of the level and/or activity of p53 or MDM2 or MDMX, by peptidomimetic macrocycles derived from p53, is used, for example, to ameliorate or reduce the adverse symptoms of the disorder.

[0470] In another aspect, provided herein are methods for treating or preventing a disease including hyperproliferative disease and inflammatory disorder by interfering with the interaction or binding between binding partners, for example, between p53 and MDM2 or p53 and MDMX. These methods comprise administering an effective amount of a compound to a warm blooded animal, including a human. In some embodiments, the administration of one or more compounds disclosed herein induces cell growth arrest or apoptosis.

[0471] In some embodiments, the peptidomimetic macrocycles can be used to treat, prevent, and/or diagnose cancers and neoplastic conditions. As used herein, the terms “cancer”, “hyperproliferative” and “neoplastic” refer to cells having the capacity for autonomous growth, i.e., an abnormal state or condition characterized by rapidly proliferating cell growth. Hyperproliferative and neoplastic disease states can be categorized as pathologic, i.e., characterizing or constituting a disease state, or can be categorized as non-pathologic, i.e., a deviation from normal but not associated with a disease state. The term is meant to include all types of cancerous growths or oncogenic processes, metastatic tissues or malignantly transformed cells, tissues, or organs, irrespective of histopathologic type or stage of invasiveness. A metastatic tumor can arise from a multitude of primary tumor types, including but not limited to those of breast, lung, liver, colon and ovarian origin. “Pathologic hyperproliferative” cells occur in disease states characterized by malignant tumor growth. Examples of non-pathologic hyperproliferative cells include proliferation of cells associated with wound repair. Examples of cellular proliferative and/or differentiation disorders include cancer, e.g., carcinoma, sarcoma, or metastatic disorders. In some embodiments, the peptidomimetic macrocycles are novel therapeutic agents for controlling breast cancer, ovarian cancer, colon cancer, lung cancer, metastasis of such cancers and the like.

[0472] Examples of cancers or neoplastic conditions include, but are not limited to, a fibrosarcoma, myosarcoma, liposarcoma, chondrosarcoma, osteogenic sarcoma, chordoma, angiosarcoma, endotheliosarcoma, lymphangiosarcoma, lymphangioendotheliosarcoma, synovioma, mesothelioma, Ewing's tumor, leiomyosarcoma, rhabdomyosarcoma, gastric cancer, esophageal cancer, rectal cancer, pancreatic cancer, ovarian cancer, prostate cancer, uterine cancer, cancer of the head and neck, skin cancer, brain cancer, squamous cell carcinoma, sebaceous gland carcinoma, papillary carcinoma, papillary adenocarcinoma, cystadenocarcinoma, medullary carcinoma, bronchogenic carcinoma, renal cell carcinoma, hepatoma, bile duct carcinoma, choriocarcinoma, seminoma, embryonal carcinoma, Wilm's tumor, cervical cancer, testicular cancer, small cell lung carcinoma, non-small cell lung carcinoma, bladder carcinoma, epithelial carcinoma, glioma, astrocytoma, medulloblastoma, craniopharyngioma, ependymoma, pinealoma, hemangioblastoma, acoustic neuroma, oligodendroglioma, meningioma, melanoma, neuroblastoma, retinoblastoma, leukemia, lymphoma, or Kaposi sarcoma.

[0473] In some embodiments, the cancer is head and neck cancer, melanoma, lung cancer, breast cancer, or glioma.

[0474] Examples of proliferative disorders include hematopoietic neoplastic disorders. As used herein, the term “hematopoietic neoplastic disorders” includes diseases involving hyperplastic/neoplastic cells of hematopoietic origin, e.g., arising from myeloid, lymphoid or erythroid lineages, or precursor cells thereof. The diseases can arise from poorly differentiated acute leukemias, e.g., erythroblastic leukemia and acute megakaryoblastic leukemia. Additional exemplary myeloid disorders include, but are not limited to, acute promyeloid leukemia (APML), acute myelogenous leukemia (AML) and chronic myelogenous leukemia (CML); lymphoid malignancies include, but are not limited to acute lymphoblastic leukemia (ALL) which includes B-lineage ALL and T-lineage ALL, chronic lymphocytic leukemia (CLL), prolymphocytic leukemia (PLL), hairy cell leukemia (HLL) and Waldenstrom's macroglobulinemia (WM). Additional forms of malignant lymphomas include, but are not limited to non-Hodgkin lymphoma and variants thereof, peripheral T cell lymphomas, adult T cell leukemia/lymphoma (ATL), cutaneous T-cell lymphoma (CTCL), periphieral T-cell lymphoma (PTCL), large granular lymphocytic leukemia (LGF), Hodgkin's disease and Reed-Stemberg disease.

[0475] Examples of cellular proliferative and/or differentiation disorders of the breast include, but are not limited to, proliferative breast disease including, e.g., epithelial hyperplasia, sclerosing adenosis, and small duct papillomas; tumors, e.g., stromal tumors such as fibroadenoma, phyllodes tumor, and sarcomas, and epithelial tumors such as large duct papilloma; carcinoma of the breast including in situ (noninvasive) carcinoma that includes ductal carcinoma in situ (including Paget's disease) and lobular carcinoma in situ, and invasive (infiltrating) carcinoma including, but not limited to, invasive ductal carcinoma, invasive lobular carcinoma, medullary carcinoma, colloid (mucinous) carcinoma, tubular carcinoma, and invasive papillary carcinoma, and miscellaneous malignant neoplasms. Disorders in the male breast include, but are not limited to, gynecomastia and carcinoma.

[0476] Examples of cellular proliferative and/or differentiative disorders of the skin include, but are not limited to proliferative skin disease such as melanomas, including mucosal melanoma, superficial spreading melanoma, nodular melanoma, lentigo (e.g. lentigo maligna, lentigo maligna melanoma, or acral lentiginous melanoma), amelanotic melanoma, desmoplastic melanoma, melanoma with features of a Spitz nevus, melanoma with small nevus-like cells, polypoid melanoma, and soft-tissue melanoma; basal cell carcinomas including micronodular basal cell carcinoma, superficial basal cell carcinoma, nodular basal cell carcinoma (rodent ulcer), cystic basal cell carcinoma, cicatricial basal cell carcinoma, pigmented basal cell carcinoma, aberrant basal cell carcinoma, infiltrative basal cell carcinoma, nevoid basal cell carcinoma syndrome, polypoid basal cell carcinoma, pore-like basal cell carcinoma, and fibroepithelioma of Pinkus; squamus cell carcinomas including acanthoma (large cell acanthoma), adenoid squamous cell carcinoma, basaloid squamous cell carcinoma, clear cell squamous cell carcinoma, signet-ring cell squamous cell carcinoma, spindle cell squamous cell carcinoma, Marjolin's ulcer, erythroplasia of Queyrat, and Bowen's disease; or other skin or subcutaneous tumors.

[0477] Examples of cellular proliferative and/or differentiation disorders of the lung include, but are not limited to, bronchogenic carcinoma, including paraneoplastic syndromes, bronchioloalveolar carcinoma, neuroendocrine tumors, such as bronchial carcinoid, miscellaneous tumors, and metastatic tumors; pathologies of the pleura, including inflammatory pleural effusions, noninflammatory pleural effusions, pneumothorax, and pleural tumors, including solitary fibrous tumors (pleural fibroma) and malignant mesothelioma.

[0478] Examples of cellular proliferative and/or differentiative disorders of the colon include, but are not limited to, non-neoplastic polyps, adenomas, familial syndromes, colorectal carcinogenesis, colorectal carcinoma, and carcinoid tumors.

[0479] Examples of cellular proliferative and/or differentiative disorders of the liver include, but are not limited to, nodular hyperplasias, adenomas, and malignant tumors, including primary carcinoma of the liver and metastatic tumors.

[0480] Examples of cellular proliferative and/or differentiative disorders of the ovary include, but are not limited to, ovarian tumors such as, tumors of coelomic epithelium, serous tumors, mucinous tumors, endometrioid tumors, clear cell adenocarcinoma, cystadenofibroma, Brenner tumor, surface epithelial tumors; germ cell tumors such as mature (benign) teratomas, monodermal teratomas, immature malignant teratomas, dysgerminoma, endodermal sinus tumor, choriocarcinoma; sex cord-stomal tumors such as, granulosa-theca cell tumors, thecomafibromas, androblastomas, hill cell tumors, and gonadoblastoma; and metastatic tumors such as Krukenberg tumors.

### Combination Treatment

[0481] Combination therapy with a peptidomimetic macrocycle of the disclosure and at least one additional therapeutic agent, for example, any additional therapeutic agent described herein, can be used to treat a condition. In some embodiments, the combination therapy can produce a significantly better therapeutic result than the additive effects achieved by each individual constituent when administered alone at a therapeutic dose. In some embodiments, the dosage of the peptidomimetic macrocycle or additional therapeutic agent, for example, any additional therapeutic agent described herein, in combination therapy can be reduced as compared to monotherapy with each agent, while still achieving an overall therapeutic effect. In some embodiments, a peptidomimetic macrocycle and an additional therapeutic agent, for example, any additional therapeutic agent described herein, can exhibit a synergistic effect. In some embodiments, the synergistic effect of a peptidomimetic macrocycle and additional therapeutic agent, for example, any additional therapeutic agent described herein, can be used to reduce the total amount drugs administered to a subject, which decrease side effects experienced by the subject.

[0482] The peptidomimetic macrocycles of the disclosure can be used in combination with at least one additional pharmaceutically-active agent, for example, any additional therapeutic agent described herein. In some embodiments, the at least one additional pharmaceutically-active agent, for example, any additional therapeutic agent described herein, can modulate the same or a different target as the peptidomimetic macrocycles of the disclosure. In some embodiments, the at least one additional pharmaceutically-active agent, for example, any additional therapeutic agent described herein, can modulate the same target as the peptidomimetic macrocycles of the disclosure, or other components of the same pathway, or overlapping sets of target enzymes. In some embodiments, the at least one additional pharmaceutically-active agent, for example, any additional therapeutic agent described herein, can modulate a different target from the peptidomimetic macrocycles of the disclosure.

[0483] Accordingly, in one aspect, the present disclosure provides a method for treating cancer, the method comprising administering to a subject in need thereof (a) an effective amount of a peptidomimetic macrocycle of the disclosure and (b) an effective amount of at least one additional pharmaceutically active agent, for example, any additional therapeutic agent described herein, to provide a combination therapy. In some embodiments, the combination therapy may have an enhanced therapeutic effect compared to the effect of the peptidomimetic macrocycle and the at least one additional pharmaceutically active agent each administered alone. According to certain exemplary embodiments, the combination therapy has a synergistic therapeutic effect. According to this embodiment, the combination therapy produces a significantly better therapeutic result (e.g., anti-cancer, cell growth arrest, apoptosis, induction of differentiation, cell death, etc.) than the additive effects achieved by each individual constituent when administered alone at a therapeutic dose.

[0484] Combination therapy includes but is not limited to the combination of peptidomimetic macrocycles of this disclosure with chemotherapeutic agents, therapeutic antibodies, and radiation treatment, to provide a synergistic therapeutic effect. In some embodiments, the peptidomimetic macrocycles of the disclosure are used in combination with one or more anti-cancer (antineoplastic or cytotoxic) chemotherapy drug. Suitable chemotherapeutic agents for use in the combinations of the present disclosure include, but are not limited to, alkylating agents, antibiotic agents, antimetabolic agents, hormonal agents, plant-derived agents, anti-angiogenic agents, differentiation inducing agents, cell growth arrest inducing agents, apoptosis inducing agents, cytotoxic agents, agents affecting cell bioenergetics, biologic agents, e.g., monoclonal antibodies, kinase inhibitors and inhibitors of growth factors and their receptors, gene therapy agents, cell therapy, or any combination thereof.

[0485] In some embodiments, a method of treating cancer in a subject in need thereof can comprise administering to the subject a therapeutically effective amount of a p53 agent that inhibits the interaction between p53 and MDM2 and/or p53 and MDMX, and/or modulates the activity of p53 and/or MDM2 and/or MDMX; and at least one additional pharmaceutically-active agent. In some examples, the p53 agent is selected from the group consisting of a small organic or inorganic molecule; a saccharine; an oligosaccharide; a polysaccharide; a peptide, a protein, a peptide analog, a peptide derivative; an antibody, an antibody fragment, a peptidomimetic; a peptidomimetic macrocycle of the disclosure; a nucleic acid; a nucleic acid analog, a nucleic acid derivative; an extract made from biological materials; a naturally-occurring or synthetic composition; and any combination thereof.

[0486] In some embodiments, the p53 agent is selected from the group consisting of RG7388 (RO5503781, idasanutlin), RG7112 (RO5045337), nutlin3a, nutlin3b, nutlin3, nutlin2, spirooxindole containing small molecules, 1,4-diazepines, 1,4-benzodiazepine-2,5-dione compounds, WK23, WK298, SJ172550, RO2443, RO5963, RO5353, RO2468, MK8242 (SCH900242), M1888, M1773 (SAR405838), NVPCGM097, DS3032b, AM8553, AMG232, NSC207895 (X1006), JNJ26854165 (serdemetan), RITA (NSC652287), YH239EE, or any combination thereof. In some examples, the at least one additional pharmaceutically-active agent is selected from the group consisting of palbociclib (PD0332991); abemaciclib (LY2835219); ribociclib (LEE 011); voruciclib (P1446A-05); fascaplysin; arcyriaflavin; 2-bromo-12,13-dihydro-5H-indolo[2,3-a]pyrrolo[3,4-c]carbazole-5,7(6H)-dione; 3-amino thioacridone (3-ATA), trans-4-((6-(ethylamino)-2-((1-(phenylmethyl)-1H-indol-5-yl)amino)-4-pyrimidinyl)amino)-cyclohexano (CINK4); 1,4-dimethoxyacridine-9(10H)-thione (NSC 625987); 2-methyl-5-(p-tolylamino)benzo[d]thiazole-4,7-dione (ryuvidine); and flavopiridol (alvocidib); and any combination thereof.

a. Combination Treatment with Estrogen Receptor Antagonists

[0487] In some embodiments, the peptidomimetic macrocycles of the disclosure are used in combination with an estrogen receptor antagonist. In some embodiments, the peptidomimetic macrocycles of the disclosure are used in combination with toremifene (Fareston®), fulvestrant (Faslodex®), or tamoxifen citrate (Soltamox®).

[0488] Fulvestrant is a selective estrogen receptor degrader (SERD) and is indicated for the treatment of hormone receptor positive metastatic breast cancer in postmenopausal women with disease progression following anti-estrogen therapy. Fulvestrant is a complete estrogen receptor antagonist with little to no agonist effects and accelerates the proteasomal degradation of the estrogen receptor. Fulvestrant has poor oral bioavailability and is administered via intramuscular injection. Fulvestrant-induced expression of ErbB3 and ErbB4 receptors sensitizes oestrogen receptor-positive breast cancer cells to heregulin beta1. In some embodiments, the peptidomimetic macrocycles of the disclosure are used in combination with fulvestrant.

b. Combination Treatment with Aromatase Inhibitors

[0489] In some embodiments, the peptidomimetic macrocycles of the disclosure are used in combination with an aromatase inhibitor. Aromatase inhibitors are used in the treatment of breast cancer in post-menopausal women and gynecomastia in men. Aromatase inhibitors can be used off-label to reduce estrogen conversion when using external testosterone. Aromatase inhibitors can also be used for chemoprevention in high-risk women.

[0490] In some embodiments, the peptidomimetic macrocycles of the disclosure are used in combination with a non-selective aromatase inhibitor. In some embodiments, the peptidomimetic macrocycles of the disclosure can be used in combination with a non-selective aromatase inhibitor, such as aminoglutethimide or testolactone (Teslac®). In some embodiments, the peptidomimetic macrocycles of the disclosure are used in combination with a selective aromatase inhibitor. In some embodiments, the peptidomimetic macrocycles of the disclosure are used in combination with a selective aromatase inhibitor, such as anastrozole (Arimidex®), letrozole (Femara®), exemestane (Aromasin®), vorozole (Rivizor®), formestane (Lentaron®), or fadrozole (Afema®). In some embodiments, the peptidomimetic macrocycles of the disclosure are used in combination with exemestane. In some embodiments, the peptidomimetic macrocycles of the disclosure are used in combination with an aromatase inhibitor that has unknown mechanism of action, such as 1,4,6-androstatrien-3,17-dione (ATD) or 4-androstene-3,6,17-trione.

c. Combination Treatment with mTOR Inhibitors

[0491] In some embodiments, the peptidomimetic macrocycles of the disclosure are used in combination with an mTOR inhibitor. mTOR inhibitors are drugs that inhibit the mechanistic target of rapamycin (mTOR), which is a serine/threonine-specific protein kinase that belongs to the family of phosphatidylinositol-3 kinase (PI3K)-related kinases (PIKKs). mTOR regulates cellular metabolism, growth, and proliferation by forming and signaling through the protein complexes mTORC1 and mTORC2.

[0492] In some embodiments, the peptidomimetic macrocycles of the disclosure are used in combination with an mTOR inhibitor, such as rapamycin, temsirolimus (CCI-779), everolimus (RAD001), ridaforolimus (AP-23573). In some embodiments, the peptidomimetic macrocycles of the disclosure are used in combination with everolimus (Afinitor®). Everolimus affects the mTORC1 protein complex and can lead to hyper-activation of the kinase AKT, which can lead to longer survival in some cell types. Everolimus binds to FKBP12, a protein receptor which directly interacts with mTORC1 and inhibits downstream signaling. mRNAs that codify proteins implicated in the cell cycle and in the glycolysis process are impaired or altered as a result, inhibiting tumor growth and proliferation.

[0493] In some embodiments, the peptidomimetic macrocycles of the disclosure are used in combination with a mTOR inhibitor and an aromatase inhibitor. For example, the peptidomimetic macrocycles can be used in combination with everolimus and exemestane.

d. Combination Treatment with Antimetabolites

[0494] Antimetabolites are chemotherapy treatments that are similar to normal substances within the cell. When cells incorporate the antimetabolites into the cellular metabolism, the cells are unable to divide. Antimetabolites are cell-cycle specific and attack cells at specific phases in the cell cycle.

[0495] In some examples, the peptidomimetic macrocycles of the disclosure are used in combination with one or more antimetabolites, such as a folic acid antagonist, pyrimidine antagonist, purine antagonist, or an adenosine deaminase inhibitor. In some embodiments, the peptidomimetic macrocycles of the disclosure are used in combination with an antimetabolite, such as methotrexate, 5-fluorouracil, foxuridine, cytarabine, capecitabine, gemcitabine, 6-mercaptopurine, 6-thioguanine, cladribine, fludarabine, nelarabine, or pentostatin. In some embodiments, the peptidomimetic macrocycles of the disclosure are used in combination with capecitabine (Xeloda®), gemcitabine (Gemzar®), or cytarabine (Cytosar-U®).

e. Combination Treatment with Plant Alkaloids

[0496] In some embodiments, the peptidomimetic macrocycles of the disclosure are used in combination with plant alkaloids. In some embodiments, the peptidomimetic macrocycles of the disclosure are used in combination with plant alkaloids, such as vinca alkaloids, taxanes, podophyllotoxins, or camptothecan analogues. In some embodiments, the peptidomimetic macrocycles of the disclosure are used in combination with plant alkaloids, such as vincristine, vinblastine, vinorelbine, paclitaxel, docetaxel, etoposide, tenisopide, irinotecan, or topotecan.

[0497] In some embodiments, the peptidomimetic macrocycles of the disclosure are used in combination with taxanes, such as paclitaxel (Abraxane® or Taxol®) and docetaxel (Taxotere®). In some embodiments, the peptidomimetic macrocycles of the instant disclosure are used in combination with paclitaxel. In some embodiments, the peptidomimetic macrocycles of the instant disclosure are used in combination with docetaxel.

f. Combination Treatment with Therapeutic Antibodies

[0498] In some embodiments, the peptidomimetic macrocycles of the disclosure are used in combination with therapeutic antibodies. In some embodiments, the peptidomimetic macrocycles of the disclosure are used in combination with naked monoclonal antibodies, such as alemtuzumab (Campath®) or trastuzumab (Herceptin®). In some embodiments, the peptidomimetic macrocycles of the disclosure are used in combination with conjugated monoclonal antibodies, such as radiolabeled antibodies or chemolabeled antibodies. In some embodiments, the peptidomimetic macrocycles of the disclosure are used in combination with conjugated monoclonal antibodies, such as ibritumomab tiuxetan (Zevalin®), brentuximab vedotin (Adcetris®), ado-trastuzumab emtansine (Kadcyla®), or denileukin diftitox (Ontak®). In some embodiments, the peptidomimetic macrocycles of the disclosure are used in combination with bispecific monoclonal antibodies, such as blinatumomab (Blincyto®).

[0499] In some embodiments, the peptidomimetic macrocycles of the disclosure are used in combination with an anti-CD20 antibody, such as rituximab (Mabthera®/Rituxan®), obinutuzumab (Gazyva®), ibritumomab tiuxetan, tositumomab, ofatumumab (Genmab®), ocaratuzumab, ocrelizumab, TRU-015, or veltuzumab. Other antibodies that can be used in combination with the peptidomimetic macrocycles of the disclosure include antibodies against the programed cell death (PD-1) receptor, for example pembrolizumab (Keytruda®) or nivolumba (Opdivo®).

g. Combination Treatment with PD-L1 and/or PD-1 Antagonists

[0500] The PD-1 pathway comprises the immune cell co-receptor Programmed Death-1 (PD-1) and the PD-1 ligands PD-L1 and PD-L2. The PD-1 pathway mediates local immunosuppression in the tumor microenvironment. PD-1 and PD-L1 antagonists suppress the immune system. In some embodiments, a PD-1 or PD-L1 antagonist is a monoclonal antibody or antigen binding fragment thereof that specifically binds to, blocks, or downregulates PD-1 or PD-L1, respectively. In some embodiments, a PD-1 or PD-L1 antagonist is a compound or biological molecule that specifically binds to, blocks, or downregulates PD-1 or PD-L1, respectively.

[0501] In some embodiments, the peptidomimetic macrocycles of the disclosure are used in combination with a PD-1 or PD-L1 antagonist. In some embodiments, the peptidomimetic macrocycles of the disclosure are used in combination with a PD-1/PD-L1 antagonist, for example, MK-3475, nivolumab (Opdivo®), pembrolizumab (Keytruda®), humanized antibodies (i.e., h409A1 1, h409A16 and h409A17), AMP-514, BMS-936559, MEDI0680, MEDI4736, MPDL3280A, MSB0010718C, MDX-1105, MDX-1106, or pidilzumab. In some embodiments, the peptidomimetic macrocycles of the disclosure are used in combination with a PD-1/PD-L1 antagonist that is an immunoadhesion molecule, such as AMP-224. In some embodiments, the peptidomimetic macrocycles of the disclosure are used in combination with a PD-1/PD-L1 antagonist to treat cancer cells or a tumor that overexpresses PD-1 or PD-L1. In some embodiments, the peptidomimetic macrocycles of the disclosure are used in combination with a PD-1/PD-L1 antagonist to treat cancer cells or a tumor that overexpresses miR-34.

h. Combination Treatment with Anti-Hormone Therapy

[0502] Anti-hormone therapy uses an agent to suppress selected hormones or the effects. Anti-hormone therapy is achieved by antagonizing the function of hormones with a hormone antagonist and/or by preventing the production of hormones. In some embodiments, the suppression of hormones can be beneficial to subjects with certain cancers that grow in response to the presence of specific hormones. In some embodiments, the peptidomimetic macrocycles of the disclosure are used in combination with a hormone antagonist.

[0503] In some embodiments, the peptidomimetic macrocycles of the disclosure are used in combination with anti-androgens, anti-estrogens, aromatase inhibitors, or luteinizing hormone-releasing hormone (LHRH) agonists. In some embodiments, the peptidomimetic macrocycles of the disclosure are used in combination with anti-androgens, such as bicalutamide (Casodex®), cyproterone (Androcur®), flutamide (Euflex®), or nilutamide (Anandron®). In some embodiments, the peptidomimetic macrocycles of the disclosure are used in combination with anti-estrogens, such as fulvestrant (Faslodex®), raloxifene (Evista®), or tamoxifen (Novaladex®, Tamofen®). In some embodiments, the peptidomimetic macrocycles of the disclosure are used in combination with LHRH agonists, such as buserelin (Suprefact®), goserelin (Zoladex®), or leuprolide (Lupron®, Lupron Depot®, Eligard®).

i. Combination Treatment with Hypomethylating (Demethylating) Agents

[0504] Hypomethylating (demethylating) agents inhibit DNA methylation, which affects cellular function through successive generations of cells without changing the underlying DNA sequence. Hypomethylating agents can block the activity of DNA methyltransferase. In some embodiments, the peptidomimetic macrocycles of the disclosure can be used in combination with hypomethylating agents, such as azacitidine (Vidaza®, Azadine®) or decitabine (Dacogen®).

j. Combination Treatment with Anti-Inflammatory Agents

[0505] In some embodiments, the peptidomimetic macrocycles of the disclosure can be used in combination with nonsteroidal anti-inflammatory drugs (NSAIDs), specific COX-2 inhibitors, or corticosteroids. In some embodiments, the peptidomimetic macrocycles of the disclosure can be used in combination with NSAIDs, such as aspirin, ibuprofen, naproxen, celecoxib, ketorolac, or diclofenac. In some embodiments, the peptidomimetic macrocycles of the disclosure can be used in combination with specific COX-2 inhibitors, such as celecoxib (Celebrex®), rofecoxib, or etoricoxib. In some embodiments, the peptidomimetic macrocycles of the disclosure can be used in combination with corticosteroids, such as dexamethasone or glucosteroids (e.g., hydrocortisone and prednisone).

k. Combination Treatment with HDAC Inhibitors

[0506] Histone deacetylase (HDAC) inhibitors are chemical compounds that inhibit histone deacetylase. HDAC inhibitors can induce p21 expression, a regulator of p53 activity. In some embodiments, the peptidomimetic macrocycles of the disclosure can be used in combination with an HDAC inhibitor. In some embodiments, the peptidomimetic macrocycles of the disclosure can be used in combination with an HDAC inhibitor, such as vorinostat, romidepsin (Istodax®), chidamide, panobinostat (Farydak®), belinostat (PDX101), panobinostat (LBH589), valproic acid, mocetinostat (MGCD0103), abexinostat (PCI-24781), entinostat (MS-275), SB939, resminostat (4SC-201), givinostat (ITF2357), quisinostat (JNJ-26481585), HBI-8000, kevetrin, CUDC-101, AR-42, CHR-2845, CHR-3996, 4SC-202, CG200745, ACY-1215, ME-344, sulforaphane, or trichostatin A.

l. Combination Treatment with Platinum-Based Antineoplastic Drugs

[0507] Platinum-based antineoplastic drugs are coordinated complex of platinum. In some embodiments, the peptidomimetic macrocycles of the disclosure can be used in combination with a platinum-based antineoplastic drug, such as cisplatin, oxaliplatin, carboplatin, nedaplatin, triplatin tetranitrate, phenanthriplatin, picoplatin, or satraplatin. In some embodiments, the peptidomimetic macrocycles of the disclosure can be used in combination with cisplatin or carboplatin. In some embodiments, the peptidomimetic macrocycles of the disclosure can be used in combination with cisplatinum, platamin, neoplatin, cismaplat, cis-diamminedichloroplatinum(II), or CDDP; Platinol®) and carboplatin (also known as cis-diammine(1,1-cyclobutanedicarboxylato)platinum(II); tradenames Paraplatin® and Paraplatin-AQ®).

m. Combination Treatment with Kinase Inhibitors

[0508] Abnormal activation of protein phosphorylation is frequently either a driver of direct consequence of cancer. Kinase signaling pathways are involved in the phenotypes of tumor biology, including proliferation, survival, motility, metabolism, angiogenesis, and evasion of antitumor immune responses.

[0509] MEK Inhibitors:

[0510] MEK inhibitors are drugs that inhibit the mitogen-activated protein kinase enzymes MEK1 and/or MEK2. In some embodiments, the peptidomimetic macrocycles of the disclosure can be used in combination with a MEK1 inhibitor. In some embodiments, the peptidomimetic macrocycles of the disclosure can be used in combination with a MEK2 inhibitor. In some embodiments, the peptidomimetic macrocycles of the disclosure can be used in combination with an agent that can inhibit MEK1 and MEK2. In some embodiments, the peptidomimetic macrocycles of the disclosure can be used in combination with a MEK1/MEK2 inhibitor, such as trametinib (Mekinist®), cobimetinib, binimetinib, selumetinib (AZD6244), pimasertibe (AS-703026), PD-325901, CI-1040, PD035901, or TAK-733. In some embodiments, the peptidomimetic macrocycles of the disclosure are used in combination with trametinib. In some embodiments, the peptidomimetic macrocycles of the disclosure are used in combination with cobimetinib.

[0511] BRAF Inhibitors:

[0512] BRAF inhibitors are drugs that inhibit the serine/threonine-protein kinase B-raf (BRAF) protein. In some embodiments, the peptidomimetic macrocycles of the disclosure can be used in combination with a BRAF inhibitor. In some embodiments, the peptidomimetic macrocycles of the disclosure can be used in combination with a BRAF inhibitor that can inhibit wild type BRAF. In some embodiments, the peptidomimetic macrocycles of the disclosure can be used in combination with a BRAF inhibitor that can inhibit mutated BRAF. In some embodiments, the peptidomimetic macrocycles of the disclosure can be used in combination with a BRAF inhibitor that can inhibit V600E mutated BRAF. In some embodiments, the peptidomimetic macrocycles of the disclosure can be used in combination with a BRAF inhibitor, such as vemurafenib (Zelboraf®), dabrafenib (Tafinlar®), C-1, NVP-LGX818, or sorafenib (Nexavar®).

[0513] KRAS Inhibitors:

[0514] KRAS is a gene that acts as an on/off switch in cell signaling. In some embodiments, the peptidomimetic macrocycles of the disclosure can be used in combination with a KRAS inhibitor. In some embodiments, the peptidomimetic macrocycles of the disclosure can be used in combination with a wild type KRAS inhibitor. In some embodiments, the peptidomimetic macrocycles of the disclosure can be used in combination with a mutated KRAS inhibitor.

[0515] BTK Inhibitors:

[0516] Bruton's tyrosine kinase (BTK) is a non-receptor tyrosine kinase of the Tec kinase family that is involved in B-cell receptor signaling. In some embodiments, the peptidomimetic macrocycles of the disclosure can be used in combination with a BTK inhibitor. In some embodiments, the peptidomimetic macrocycles of the disclosure can be used in combination with a BTK inhibitor, such as ibrutinib or acalabrutinib.

[0517] CDK Inhibitors:

[0518] CDK4 and CDK6 are cyclin-dependent kinases that control the transition between the G1 and S phases of the cell cycle. CDK4/CDK6 activity is deregulated and overactive in cancer cells. Selective CDK4/CDK6 inhibitors can block cell-cycle progression in the mid-G1 phase of the cell cycle, causing arrest and preventing the proliferation of cancer cells. In some embodiments, the peptidomimetic macrocycles of the disclosure can be used in combination with a CDK4/CDK6 inhibitor. In some embodiments, the peptidomimetic macrocycles of the disclosure can be used in combination with a CDK4/CDK6 inhibitor, such as palbociclib (Ibrance®), ribociclib, trilaciclib, seliciclib, dinaciclib, milciclib, roniciclib, atuveciclib, briciclib, riviciclib, voruciclib, or abemaciclib. In some embodiments, the peptidomimetic macrocycles of the disclosure can be used in combination with palbociclib. In some embodiments, the peptidomimetic macrocycles of the disclosure can be used in combination with ribociclib. In some embodiments, the peptidomimetic macrocycles of the disclosure can be used in combination with abemaciclib.

[0519] In some examples, the peptidomimetic macrocycles of the disclosure may be used in combination with an inhibitor of CDK4 and/or CDK6 and with an agent that reinforces the cytostatic activity of CDK4/6 inhibitors and/or with an agent that converts reversible cytostasis into irreversible growth arrest or cell death. Exemplary cancer subtypes include NSCLC, melanoma, neuroblastoma, glioblastoma, liposarcoma, and mantle cell lymphoma. In some examples, the peptidomimetic macrocycles of the disclosure may also be used in combination with at least one additional pharmaceutically active agent that alleviates CDKN2A (cyclin-dependent kinase inhibitor 2A) deletion. In some example, the peptidomimetic macrocycles of the disclosure may also be used in combination with at least one additional pharmaceutically active agent that alleviates CDK9 (cyclin-dependent kinase 9) abnormality.

[0520] In some embodiments, the peptidomimetic macrocycles of the disclosure can be used in combination with a CDK2, CDK7, and/or CDK9 inhibitor. In some embodiments, the peptidomimetic macrocycles of the disclosure can be used in combination with a CDK2, CDK7, or CDK9 inhibitor, such as seliciclib, voruciclib, or milciclib. In some embodiments, the peptidomimetic macrocycles of the disclosure can be used in combination with a CDK inhibitor, such as dinaciclib, roniciclib (Kisqali®), or briciclib. In some examples, the peptidomimetic macrocycles of the disclosure may also be used in combination with at least one additional pharmaceutically-active agent that alleviates CDKN2A (cyclin-dependent kinase inhibitor 2A) deletion.

[0521] In some embodiments, a method of treating cancer in a subject in need thereof can comprise administering to the subject a therapeutically effective amount of a p53 agent that inhibits the interaction between p53 and MDM2 and/or p53 and MDMX, and/or modulates the activity of p53 and/or MDM2 and/or MDMX; and at least one additional pharmaceutically-active agent, wherein the at least one additional pharmaceutically-active agent modulates the activity of CDK4 and/or CDK6, and/or inhibits CDK4 and/or CDK6.

[0522] ATM Regulators:

[0523] The peptidomimetic macrocycles of the disclosure may also be used in combination with one or more pharmaceutically-active agent that regulates the ATM (upregulate or downregulate). In some embodiments the compounds described herein can synergize with one or more ATM regulators. In some embodiments one or more of the compounds described herein can synergize with all ATM regulators.

[0524] AKT Inhibitors:

[0525] In some embodiments, the peptidomimetic macrocycles of the disclosure may be used in combination with one or more pharmaceutically-active agent that inhibits the AKT (protein kinase B (PKB)). In some embodiments the compounds described herein can synergize with one or more AKT inhibitors.

n. Combination Treatment with Other Pharmaceutically-Active Agents

[0526] In some examples, the peptidomimetic macrocycles of the disclosure may also be used in combination with at least one additional pharmaceutically-active agent that alleviates PTEN (phosphatase and tensin homolog) deletion.

[0527] In some examples, the peptidomimetic macrocycles of the disclosure may also be used in combination with at least one additional pharmaceutically-active agent that alleviates Wip-1Alpha over expression.

[0528] In some examples, the peptidomimetic macrocycles of the disclosure may be used in combination with at least one additional pharmaceutically-active agent that is a Nucleoside metabolic inhibitor. Exemplary nucleoside metabolic inhibitors that may be used include capecitabine, gemcitabine and cytarabine (Arac).

[0529] The table below lists suitable additional pharmaceutically-active agents for use with the methods described herein.

| | | | Drug works predominately |
|---|---|---|---|
| Cancer Type | Drug name | Brand name | in S or M phase |
| ALL | ABT-199 | none | No |
| ALL | clofarabine | Clofarex | Yes; S phase |
| ALL | cyclophosphamide | Clafen, Cytoxan, Neosar | Yes: S phase |
| ALL | cytarabine | Cytosar-U, Tarabine PFS | Yes: S phase |
| ALL | doxorubicin | Adriamycin | Yes: S phase |
| ALL | imatinib mesylate | Gleevec | No |
| ALL | methotrexate | Abitrexate, Mexate, Folex | Yes: S phase |
| ALL | prednisone | Deltasone, Medicorten | No |
| ALL | romidepsin | Istodax | |
| ALL | vincristine | Vincasar | Yes: M phase |
| AML | ABT-199 | none | No |
| AML | azacitadine | Vidaza | No |
| AML | cyclophosphamide | Clafen, Cytoxan, Neosar | Yes: S phase |
| AML | cytarabine | Cytosar-U, Tarabine PFS | Yes: S phase |
| AML | decitabine | Dacogen | No |
| AML | doxorubicin | Adriamycin | Yes: S phase |
| AML | etoposide | Etopophos, Vepesid | Yes: S and M phases |
| AML | vincristine | Vincasar | Yes: M phase |
| bone | doxorubicin | Adriamycin | Yes: S phase |
| bone | methotrexate | Abitrexate, Mexate, Folex | Yes: S phase |
| breast | capecitabine | Xeloda | Yes: S phase |
| breast | cyclophosphamide | Clafen, Cytoxan, Neosar | Yes: S phase |
| breast | docetaxel | Taxotere | Yes: M phase |
| breast | doxorubicin | Adriamycin | Yes: S phase |
| breast | eribulin mesylate | Haliben | Yes: M phase |
| breast | everolimus | Afinitor | No |
| breast | exemestane | Aromasin | No |
| breast | fluorouracil | Adrucil, Efudex | Yes: S phase |
| breast | fulvestrant | Faslofex | |
| breast | gemcitabine | Gemzar | Yes: S phase |
| breast | goserelin acetate | Zoladex | No |
| breast | letrozole | Femara | No |
| breast | megestrol acetate | Megace | No |
| breast | methotrexate | Abitrexate, Mexate, Folex | Yes: S phase |
| breast | paclitaxel | Abraxane ®, Taxol | Yes: M phase |
| breast | palbociclib | Ibrance | Might cause G1 arrest |
| breast | pertuzumab | Perjeta | No |
| breast | tamoxifen citrate | Nolvadex | No |
| breast | trastuzumab | Herceptin, Kadcyla | No |
| colon | capecitabine | Xeloda | Yes: S phase |
| colon | cetuximab | Erbitux | No |
| colon | fluorouracil | Adrucil, Efudex | Yes: S phase |
| colon | irinotecan | camptosar | Yes: S and M phases |
| colon | ramucirumab | Cyramza | No |
| endometrial | carboplatin | Paraplatin, Paraplat | Yes: S phase |
| endometrial | cisplatin | Platinol | Yes: S phase |
| endometrial | doxorubicin | Adriamycin | Yes: S phase |
| endometrial | megestrol acetate | Megace | No |
| endometrial | paclitaxel | Abraxane ®, Taxol | Yes: M phase |
| gastric | docetaxel | Taxotere | Yes: M phase |
| gastric | doxorubicin | Adriamycin | Yes: S phase |
| gastric | fluorouracil | Adrucil, Efudex | Yes: S phase |
| gastric | ramucirumab | Cyramza | No |
| gastric | trastuzumab | Herceptin | No |
| kidney | axitinib | Inlyta | No |
| kidney | everolimus | Afinitor | No |
| kidney | pazopanib | Votrient | No |
| kidney | sorafenib tosylate | Nexavar | No |
| liver | sorafenib tosylate | Nexavar | No |
| melanoma | dacarbazine | DTIC, DTIC-Dome | Yes: S phase |
| melanoma | paclitaxel | Abraxane ®, Taxol | Yes: M phase |
| melanoma | trametinib | Mekinist | No |
| melanoma | vemurafenib | Zelboraf | No |
| melanoma | dabrafenib | Taflinar | |
| mesothelioma | cisplatin | Platinol | Yes: S phase |
| mesothelioma | pemetrexed | Alimta | Yes: S phase |
| NHL | ABT-199 | none | No |
| NHL | bendamustine | Treanda | Causes DNA crosslinking, |
| | | | but is also toxic to resting |
| | | | cells |
| NHL | bortezomib | Velcade | No |
| NHL | brentuximab vedotin | Adcetris | Yes: M phase |
| NHL | chlorambucil | Ambochlorin, Leukeran, Linfolizin | Yes: S phase |
| NHL | cyclophosphamide | Clafen, Cytoxan, Neosar | Yes: S phase |
| NHL | dexamethasone | Decadrone, Dexasone | No |
| NHL | doxorubicin | Adriamycin | Yes: S phase |
| NHL | Ibrutinib | Imbruvica | No |
| NHL | lenalidomide | Revlimid | No |
| NHL | methotrexate | Abitrexate, Mexate, Folex | Yes: S phase |
| NHL | obinutuzumab | Gazyva | No |
| NHL | prednisone | Deltasone, Medicorten | No |
| NHL | romidepsin | Istodax | |
| NHL | rituximab | Rituxan | No |
| NHL | vincristine | Vincasar | Yes: M phase |
| NSCLC | afatinib Dimaleate | Gilotrif | No |
| NSCLC | carboplatin | Paraplatin, Paraplat | Yes: S phase |
| NSCLC | cisplatin | Platinol | Yes: S phase |
| NSCLC | crizotinib | Xalkori | No |
| NSCLC | docetaxel | Taxotere | Yes: M phase |
| NSCLC | erlotinib | Tarceva | No |
| NSCLC | gemcitabine | Gemzar | Yes: S phase |
| NSCLC | methotrexate | Abitrexate, Mexate, Folex | Yes: S phase |
| NSCLC | paclitaxel | Abraxane ®, Taxol | Yes: M phase |
| NSCLC | palbociclib | Ibrance | Might cause G1 arrest |
| NSCLC | pemetrexed | Alimta | Yes: S phase |
| NSCLC | ramucirumab | Cyramza | No |
| ovarian | carboplatin | Paraplatin, Paraplat | Yes: S phase |
| ovarian | cisplatin | Platinol | Yes; S phase |
| ovarian | cyclophosphamide | Clafen, Cytoxan, Neosar | Yes: S phase |
| ovarian | gemcitabine | Gemzar | Yes: S phase |
| ovarian | olaparib | Lynparza | Yes: G2/M phase arrest |
| ovarian | paclitaxel | Abraxane ®, Taxol | Yes: M phase |
| ovarian | topotecan | Hycamtin | Yes: S phase |
| prostate | abiraterone | Zytiga | No |
| prostate | cabazitaxel | Jevtana | Yes: M phase |
| prostate | docetaxel | Taxotere | Yes: M phase |
| prostate | enzalutamide | Xtandi | No |
| prostate | goserelin acetate | Zoladex | No |
| prostate | prednisone | Deltasone, Medicorten | No |
| soft tissue sarcoma | doxorubicin | Adriamycin | Yes: S phase |
| soft tissue sarcoma | imatinib mesylate | Gleevec | No |
| soft tissue sarcoma | pazopanib | Votrient | No |
| T-cell lymphoma | romidepsin | Istodax | |

### Administration of Combination Treatment

[0530] The peptidomimetic macrocycles or a composition comprising same and the at least one additional pharmaceutically-active agent, for example, any additional therapeutic agent described herein, or a composition comprising same can be administered simultaneously (i.e., simultaneous administration) and/or sequentially (i.e., sequential administration).

[0531] According to certain embodiments, the peptidomimetic macrocycles and the at least one additional pharmaceutically-active agent, for example, any additional therapeutic agent described herein, are administered simultaneously, either in the same composition or in separate compositions. The term “simultaneous administration,” as used herein, means that the peptidomimetic macrocycle and the at least one additional pharmaceutically-active agent, for example, any additional therapeutic agent described herein, are administered with a time separation of no more than a few minutes, for example, less than about 15 minutes, less than about 10, less than about 5, or less than about 1 minute. When the drugs are administered simultaneously, the peptidomimetic macrocycle and the at least one additional pharmaceutically-active agent, for example, any additional therapeutic agent described herein, may be contained in the same composition (e.g., a composition comprising both the peptidomimetic macrocycle and the at least additional pharmaceutically-active agent) or in separate compositions (e.g., the peptidomimetic macrocycle is contained in one composition and the at least additional pharmaceutically-active agent is contained in another composition).

[0532] According to other embodiments, the peptidomimetic macrocycles and the at least one additional pharmaceutically-active agent, for example, any additional therapeutic agent described herein, are administered sequentially, i.e., the peptidomimetic macrocycle is administered either prior to or after the administration of the additional pharmaceutically-active agent. The term “sequential administration” as used herein means that the peptidomimetic macrocycle and the additional pharmaceutically-active agent, for example, any additional therapeutic agent described herein, are administered with a time separation of more than a few minutes, for example, more than about 15 minutes, more than about 20 or more minutes, more than about 30 or more minutes, more than about 40 or more minutes, more than about 50 or more minutes, or more than about 60 or more minutes. In some embodiments, the peptidomimetic macrocycle is administered before the additional pharmaceutically-active agent, for example, any additional therapeutic agent described herein. In some embodiments, the pharmaceutically-active agent, for example, any additional therapeutic agent described herein, is administered before the peptidomimetic macrocycle. The peptidomimetic macrocycle and the additional pharmaceutically-active agent, for example, any additional therapeutic agent described herein, are contained in separate compositions, which may be contained in the same or different packages.

[0533] In some embodiments, the administration of the peptidomimetic macrocycles and the additional pharmaceutically-active agent, for example, any additional therapeutic agent described herein, are concurrent, i.e., the administration period of the peptidomimetic macrocycles and that of the agent overlap with each other. In some embodiments, the administration of the peptidomimetic macrocycles and the additional pharmaceutically-active agent, for example, any additional therapeutic agent described herein, are non-concurrent. For example, in some embodiments, the administration of the peptidomimetic macrocycles is terminated before the additional pharmaceutically-active agent, for example, any additional therapeutic agent described herein, is administered. In some embodiments, the administration of the additional pharmaceutically-active agent, for example, any additional therapeutic agent described herein, is terminated before the peptidomimetic macrocycle is administered. The time period between these two non-concurrent administrations can range from being days apart to being weeks apart.

[0534] The dosing frequency of the peptidomimetic macrocycle and the at least one additional pharmaceutically-active agent, for example, any additional therapeutic agent described herein, may be adjusted over the course of the treatment, based on the judgment of the administering physician. When administered separately, the peptidomimetic macrocycle and the at least one additional pharmaceutically-active agent, for example, any additional therapeutic agent described herein, can be administered at different dosing frequency or intervals. For example, the peptidomimetic macrocycle can be administered weekly, while the at least one additional pharmaceutically-active agent, for example, any additional therapeutic agent described herein, can be administered more or less frequently. Or, the peptidomimetic macrocycle can be administered twice weekly, while the at least one additional pharmaceutically-active agent, for example, any additional therapeutic agent described herein, can be administered more or less frequently. In addition, the peptidomimetic macrocycle and the at least one additional pharmaceutically-active agent, for example, any additional therapeutic agent described herein, can be administered using the same route of administration or using different routes of administration.

[0535] A therapeutically effective amount of a peptidomimetic macrocycle and/or the additional pharmaceutically-active agent, for example, any additional therapeutic agent described herein, for use in therapy can vary with the nature of the condition being treated, the length of treatment time desired, the age and the condition of the patient, and can be determined by the attending physician. Doses employed for human treatment can be in the range of about 0.01 mg/kg to about 1000 mg/kg per day (e.g., about 0.01 mg/kg to about 100 mg/kg per day, about 0.01 mg/kg to about 10 mg/kg per day, about 0.1 mg/kg to about 100 mg/kg per day, about 0.1 mg/kg to about 50 mg/kg per day, about 0.1 mg/kg to about 10 mg/kg per day) of one or each component of the combinations described herein. In some embodiments, doses of a peptidomimetic macrocycle employed for human treatment are in the range of about 0.01 mg/kg to about 100 mg/kg per day (e.g., about 0.01 mg/kg to about 10 mg/kg per day, about 0.1 mg/kg to about 100 mg/kg per day, about 0.1 mg/kg to about 50 mg/kg per day, about 0.1 mg/kg to about 10 mg/kg per day, about 1 mg/kg per day). In some embodiments, doses of the additional pharmaceutically-active agent, for example, any additional therapeutic agent described herein, employed for human treatment can be in the range of about 0.01 mg/kg to about 100 mg/kg per day (e.g., about 0.1 mg/kg to about 100 mg/kg per day, about 0.1 mg/kg to about 50 mg/kg per day, about 10 mg/kg per day or about 30 mg/kg per day). The desired dose may be conveniently administered in a single dose, or as multiple doses administered at appropriate intervals, for example as two, three, four or more sub-doses per day.

[0536] In some embodiments, such as when given in combination with the at least one additional pharmaceutically active agent, for example, any additional therapeutic agent described herein, the dosage of a peptidomimetic macrocycle may be given at relatively lower dosages. In some embodiments, the dosage of a peptidomimetic macrocycle may be from about 1 ng/kg to about 100 mg/kg. The dosage of a peptidomimetic macrocycle may be at any dosage including, but not limited to, about 1 μg/kg, 25 μg/kg, 50 μg/kg, 75 μg/kg, 100 i g/kg, 125 μg/kg, 150 μg/kg, 175 μg/kg, 200 μg/kg, 225 μg/kg, 250 μg/kg, 275 μg/kg, 300 μg/kg, 325 μg/kg, 350 μg/kg, 375 μg/kg, 400 μg/kg, 425 μg/kg, 450 μg/kg, 475 μg/kg, 500 μg/kg, 525 μg/kg, 550 μg/kg, 575 μg/kg, 600 μg/kg, 625 μg/kg, 650 μg/kg, 675 μg/kg, 700 μg/kg, 725 μg/kg, 750 μg/kg, 775 μg/kg, 800 μg/kg, 825 μg/kg, 850 μg/kg, 875 μg/kg, 900 μg/kg, 925 μg/kg, 950 μg/kg, 975 μg/kg, 1 mg/kg, 2.5 mg/kg, 5 mg/kg, 10 mg/kg, 15 mg/kg, 20 mg/kg, 25 mg/kg, 30 mg/kg, 35 mg/kg, 40 mg/kg, 45 mg/kg, 50 mg/kg, 60 mg/kg, 70 mg/kg, 80 mg/kg, 90 mg/kg, or 100 mg/kg.

[0537] In some embodiments, the dosage of the additional pharmaceutically-active agent, for example, any additional therapeutic agent described herein, may be from about 1 ng/kg to about 100 mg/kg. The dosage of the additional pharmaceutically-active agent may be at any dosage including, but not limited to, about 1 μg/kg, 25 μg/kg, 50 μg/kg, 75 μg/kg, 100 i g/kg, 125 μg/kg, 150 μg/kg, 175 μg/kg, 200 μg/kg, 225 μg/kg, 250 μg/kg, 275 μg/kg, 300 μg/kg, 325 μg/kg, 350 μg/kg, 375 μg/kg, 400 μg/kg, 425 μg/kg, 450 μg/kg, 475 μg/kg, 500 μg/kg, 525 μg/kg, 550 μg/kg, 575 μg/kg, 600 μg/kg, 625 μg/kg, 650 μg/kg, 675 μg/kg, 700 μg/kg, 725 μg/kg, 750 μg/kg, 775 μg/kg, 800 μg/kg, 825 μg/kg, 850 μg/kg, 875 μg/kg, 900 μg/kg, 925 μg/kg, 950 μg/kg, 975 μg/kg, 1 mg/kg, 2.5 mg/kg, 5 mg/kg, 10 mg/kg, 15 mg/kg, 20 mg/kg, 25 mg/kg, 30 mg/kg, 35 mg/kg, 40 mg/kg, 45 mg/kg, 50 mg/kg, 60 mg/kg, 70 mg/kg, 80 mg/kg, 90 mg/kg, or 100 mg/kg.

[0538] In some embodiments, the dosage of the additional pharmaceutically-active agent is the approved dosage from the label of the additional pharmaceutically-active agent. In some embodiments, the dosage of the additional pharmaceutically-active agent is 600 mg of ribociclib; 150 mg or 200 mg of abemaciclib; 125 mg of palbociclib; 2 mg of trametinib; 175 mg/m², 135 mg/m², or 100 mg/m² of paclitaxel; 1.4 mg/m² of eribulin; 250 mg/m² (breast cancer), 100 mg/m² (non-small cell lung cancer), or 125 mg/m² (pancreatic cancer) of Abraxane®; 200 mg of Keytruda®; or 240 mg or 480 mg of Opdivo®, or a pharmaceutically-acceptable salt of any of the foregoing. In some embodiments, the approved dosages of the additional pharmaceutically-active agents can be reduced to address adverse side effects such as renal impairment or liver impairment.

[0539] The peptidomimetic macrocycle and the additional pharmaceutically-active agent, for example, any additional therapeutic agent described herein, can be provided in a single unit dosage form for being taken together or as separate entities (e.g. in separate containers) to be administered simultaneously or with a certain time difference. This time difference may be between 1 hour and 1 month, e.g., between 1 day and 1 week, e.g., 48 hours and 3 days. In addition, it is possible to administer the peptidomimetic macrocycle via another administration way than the additional pharmaceutically-active agent, for example, any additional therapeutic agent described herein. For example, it may be advantageous to administer either the peptidomimetic macrocycle or the additional pharmaceutically-active agent, for example, any additional therapeutic agent described herein, intravenously and the other systemically or orally. For example, the peptidomimetic macrocycle is administered intravenously and the additional pharmaceutically-active agent orally.

[0540] In some embodiments, the peptidomimetic macrocycle is administered about 0.1 hour, 0.2 hour, 0.3 hour, 0.4 hour, 0.5 hour, 0.6 hour, 0.7 hour, 0.8 hour, 0.9 hour, 1 hour, 2 hours, 3 hours, 4 hours, 5 hours, 6 hours, 7 hours, 8 hours, 9 hours, 10 hours, 11 hours, 12 hours, 1 day, 2 days, 3 days, 4 days, 5 days, 6 days, 7 days, 8 days, 9 days, 10 days, 11 days, 12 days, 13 days, 14 days, 15 days, 16 days, 17 days, 18 days, 19 days, 20 days, 21 days, 22 days, 23 days, 24 days, 25 days, 26 days, 27 days, 28 days, 29 days, 30 days, 1 month, 2 months, 3 months, 4 months, 5 months, 6 months, 7 months, 8 months, 9 months, 10 months, 11 months, or 12 months before the additional pharmaceutically-active agent, for example, any additional therapeutic agent described herein, is administered. In some embodiments, the peptidomimetic macrocycle is administered about 6 hours before the additional pharmaceutically-active agent, for example, any additional therapeutic agent described herein, is administered.

[0541] In some embodiments, the peptidomimetic macrocycle is administered about 0.1 hour, 0.2 hour, 0.3 hour, 0.4 hour, 0.5 hour, 0.6 hour, 0.7 hour, 0.8 hour, 0.9 hour, 1 hour, 2 hours, 3 hours, 4 hours, 5 hours, 6 hours, 7 hours, 8 hours, 9 hours, 10 hours, 11 hours, 12 hours, 1 day, 2 days, 3 days, 4 days, 5 days, 6 days, 7 days, 8 days, 9 days, 10 days, 11 days, 12 days, 13 days, 14 days, 15 days, 16 days, 17 days, 18 days, 19 days, 20 days, 21 days, 22 days, 23 days, 24 days, 25 days, 26 days, 27 days, 28 days, 29 days, 30 days, 1 month, 2 months, 3 months, 4 months, 5 months, 6 months, 7 months, 8 months, 9 months, 10 months, 11 months, or 12 months after the additional pharmaceutically-active agent, for example, any additional therapeutic agent described herein, is administered. In some embodiments, the peptidomimetic macrocycle is administered about 6 hours after the additional pharmaceutically-active agent, for example, any additional therapeutic agent described herein, is administered.

[0542] In some embodiments, the peptidomimetic macrocycle is administered chronologically before the additional pharmaceutically-active agent, for example, any additional therapeutic agent described herein. In some embodiments, the peptidomimetic macrocycle is administered from 1-24 hours, 2-24 hours, 3-24 hours, 4-24 hours, 5-24 hours, 6-24 hours, 7-24 hours, 8-24 hours, 9-24 hours, 10-24 hours, 11-24 hours, 12-24 hours, 1-30 days, 2-30 days, 3-30 days, 4-30 days, 5-30 days, 6-30 days, 7-30 days, 8-30 days, 9-30 days, 10-30 days, 11-30 days, 12-30 days, 13-30 days, 14-30 days, 15-30 days, 16-30 days, 17-30 days, 18-30 days, 19-30 days, 20-30 days, 21-30 days, 22-30 days, 23-30 days, 24-30 days, 25-30 days, 26-30 days, 27-30 days, 28-30 days, 29-30 days, 1-4 week, 2-4 weeks, 3-4 weeks, 1-12 months, 2-12 months, 3-12 months, 4-12 months, 5-12 months, 6-12 months, 7-12 months, 8-12 months, 9-12 months, 10-12 months, 11-12 months, or any combination thereof, before the additional pharmaceutically-active agent, for example, any additional therapeutic agent described herein, is administered. In some embodiments, the peptidomimetic macrocycle is administered at least 1 hour, 2 hours, 3 hours, 4 hours, 5 hours, 6 hours, 7 hours, 8 hours, 9 hours, 10 hours, 11 hours, 12 hours, 1 day, 2 days, 3 days, 4 days, 5 days, 6 days, 7 days, 8 days, 9, days, 10 days, 11 days, 12 days, 13 days, 14 days, 15 days, 16 days, 17 days, 18 days, 19 days, 20 days, 21 days, 22 days, 23 days, 24 days, 25 days, 26 days, 27 days, 28 days, 29 days, 1 week, 2 weeks, three weeks, 4 weeks, 1 month, 2 months, 3 months, 4 months, 5 months, 6 months, 7 months, 8 months, 9 months, 10 months, 11 months, 12 months, or any combination thereof, before the additional pharmaceutically-active agent, for example, any additional therapeutic agent described herein, is administered. For example, the peptidomimetic macrocycle can be administered at least 6 hours before a CDKI (e.g., seliciclib, ribociclib, abemaciclib, or palbociclib) is administered.

[0543] In some embodiments, the peptidomimetic macrocycle is administered at most 1 hour, 2 hours, 3 hours, 4 hours, 5 hours, 6 hours, 7 hours, 8 hours, 9 hours, 10 hours, 11 hours, 12 hours, 1 day, 2 days, 3 days, 4 days, 5 days, 6 days, 7 days, 8 days, 9, days, 10 days, 11 days, 12 days, 13 days, 14 days, 15 days, 16 days, 17 days, 18 days, 19 days, 20 days, 21 days, 22 days, 23 days, 24 days, 25 days, 26 days, 27 days, 28 days, 29 days, 1 week, 2 weeks, three weeks, 4 weeks, 1 month, 2 months, 3 months, 4 months, 5 months, 6 months, 7 months, 8 months, 9 months, 10 months, 11 months, 12 months, or any combination thereof, before the additional pharmaceutically-active agent is administered. For example, the peptidomimetic macrocycle can be administered at most 1 hour, 2 hours, 3 hours, 4 hours, 5 hours, 6 hours, 7 hours, 8 hours, 9 hours, 10 hours, 11 hours, 12 hours, 1 day, 2 days, 3 days, 4 days, 5 days, 6 days, 7 days, 8 days, 9, days, 10 days, 11 days, 12 days, 13 days, 14 days, 15 days, 16 days, 17 days, 18 days, 19 days, 20 days, 21 days, 22 days, 23 days, 24 days, 25 days, 26 days, 27 days, 28 days, 29 days, 1 week, 2 weeks, three weeks, 4 weeks, 1 month, 2 months, 3 months, 4 months, 5 months, 6 months, 7 months, 8 months, 9 months, 10 months, 11 months, 12 months, or any combination thereof, before a CDKI (e.g., seliciclib, ribociclib, abemaciclib, or palbociclib) is administered.

[0544] In some embodiments, the peptidomimetic macrocycle is administered about 1 hour, 2 hours, 3 hours, 4 hours, 5 hours, 6 hours, 7 hours, 8 hours, 9 hours, 10 hours, 11 hours, 12 hours, 1 day, 2 days, 3 days, 4 days, 5 days, 6 days, 7 days, 8 days, 9, days, 10 days, 11 days, 12 days, 13 days, 14 days, 15 days, 16 days, 17 days, 18 days, 19 days, 20 days, 21 days, 22 days, 23 days, 24 days, 25 days, 26 days, 27 days, 28 days, 29 days, 1 week, 2 weeks, three weeks, 4 weeks, 1 month, 2 months, 3 months, 4 months, 5 months, 6 months, 7 months, 8 months, 9 months, 10 months, 11 months, 12 months, or any combination thereof, before the additional pharmaceutically-active agent, for example, any additional therapeutic agent described herein, is administered. For example, the peptidomimetic macrocycle can be administered about 1 hour, 2 hours, 3 hours, 4 hours, 5 hours, 6 hours, 7 hours, 8 hours, 9 hours, 10 hours, 11 hours, 12 hours, 1 day, 2 days, 3 days, 4 days, 5 days, 6 days, 7 days, 8 days, 9, days, 10 days, 11 days, 12 days, 13 days, 14 days, 15 days, 16 days, 17 days, 18 days, 19 days, 20 days, 21 days, 22 days, 23 days, 24 days, 25 days, 26 days, 27 days, 28 days, 29 days, 1 week, 2 weeks, three weeks, 4 weeks, 1 month, 2 months, 3 months, 4 months, 5 months, 6 months, 7 months, 8 months, 9 months, 10 months, 11 months, 12 months, or any combination thereof, before a CDKI (e.g., seliciclib, ribociclib, abemaciclib, or palbociclib) is administered.

[0545] In some embodiments, the peptidomimetic macrocycle is administered chronologically at the same time as the at least one additional pharmaceutically active agent, for example, any additional therapeutic agent described herein.

[0546] In some embodiments, the peptidomimetic macrocycle is administered chronologically after the additional pharmaceutically-active agent, for example, any additional therapeutic agent described herein. In some embodiments, the additional pharmaceutically-active agent, for example, any additional therapeutic agent described herein, is administered from 1-24 hours, 2-24 hours, 3-24 hours, 4-24 hours, 5-24 hours, 6-24 hours, 7-24 hours, 8-24 hours, 9-24 hours, 10-24 hours, 11-24 hours, 12-24 hours, 1-30 days, 2-30 days, 3-30 days, 4-30 days, 5-30 days, 6-30 days, 7-30 days, 8-30 days, 9-30 days, 10-30 days, 11-30 days, 12-30 days, 13-30 days, 14-30 days, 15-30 days, 16-30 days, 17-30 days, 18-30 days, 19-30 days, 20-30 days, 21-30 days, 22-30 days, 23-30 days, 24-30 days, 25-30 days, 26-30 days, 27-30 days, 28-30 days, 29-30 days, 1-4 week, 2-4 weeks, 3-4 weeks, 1-12 months, 2-12 months, 3-12 months, 4-12 months, 5-12 months, 6-12 months, 7-12 months, 8-12 months, 9-12 months, 10-12 months, 11-12 months, or any combination thereof, before the peptidomimetic macrocycle is administered. In some embodiments the additional pharmaceutically-active agent is administered at least 1 hour, 2 hours, 3 hours, 4 hours, 5 hours, 6 hours, 7 hours, 8 hours, 9 hours, 10 hours, 11 hours, 12 hours, 1 day, 2 days, 3 days, 4 days, 5 days, 6 days, 7 days, 8 days, 9, days, 10 days, 11 days, 12 days, 13 days, 14 days, 15 days, 16 days, 17 days, 18 days, 19 days, 20 days, 21 days, 22 days, 23 days, 24 days, 25 days, 26 days, 27 days, 28 days, 29 days, 30 days, 1 week, 2 weeks, three weeks, 4 weeks, 1 month, 2 months, 3 months, 4 months, 5 months, 6 months, 7 months, 8 months, 9 months, 10 months, 11 months, 12 months, or any combination thereof, before the peptidomimetic macrocycle is administered. For example, seliciclib, ribociclib, abemaciclib, or palbociclib can be administered at least 1 hour, 2 hours, 3 hours, 4 hours, 5 hours, 6 hours, 7 hours, 8 hours, 9 hours, 10 hours, 11 hours, 12 hours, 1 day, 2 days, 3 days, 4 days, 5 days, 6 days, 7 days, 8 days, 9, days, 10 days, 11 days, 12 days, 13 days, 14 days, 15 days, 16 days, 17 days, 18 days, 19 days, 20 days, 21 days, 22 days, 23 days, 24 days, 25 days, 26 days, 27 days, 28 days, 29 days, 30 days, 1 week, 2 weeks, 3 weeks, 4 weeks, 1 month, 2 months, 3 months, 4 months, 5 months, 6 months, 7 months, 8 months, 9 months, 10 months, 11 months, 12 months, or any combination thereof, before the peptidomimetic macrocycle is administered.

[0547] In some embodiments, a CDKI is administered at most 1 hour, 2 hours, 3 hours, 4 hours, 5 hours, 6 hours, 7 hours, 8 hours, 9 hours, 10 hours, 11 hours, 12 hours, 1 day, 2 days, 3 days, 4 days, 5 days, 6 days, 7 days, 8 days, 9, days, 10 days, 11 days, 12 days, 13 days, 14 days, 15 days, 16 days, 17 days, 18 days, 19 days, 20 days, 21 days, 22 days, 23 days, 24 days, 25 days, 26 days, 27 days, 28 days, 29 days, 30 days, 1 week, 2 weeks, three weeks, 4 weeks, 1 month, 2 months, 3 months, 4 months, 5 months, 6 months, 7 months, 8 months, 9 months, 10 months, 11 months, 12 months, or any combination thereof, before the peptidomimetic macrocycle is administered. For example, seliciclib, ribociclib, abemaciclib, or palbociclib can be administered at most 1 hour, 2 hours, 3 hours, 4 hours, 5 hours, 6 hours, 7 hours, 8 hours, 9 hours, 10 hours, 11 hours, 12 hours, 1 day, 2 days, 3 days, 4 days, 5 days, 6 days, 7 days, 8 days, 9, days, 10 days, 11 days, 12 days, 13 days, 14 days, 15 days, 16 days, 17 days, 18 days, 19 days, 20 days, 21 days, 22 days, 23 days, 24 days, 25 days, 26 days, 27 days, 28 days, 29 days, 30 days, 1 week, 2 weeks, 3 weeks, 4 weeks, 1 month, 2 months, 3 months, 4 months, 5 months, 6 months, 7 months, 8 months, 9 months, 10 months, 11 months, 12 months, or any combination thereof, before the peptidomimetic macrocycle is administered.

[0548] In some embodiments a CDKI is administered about 1 hour, 2 hours, 3 hours, 4 hours, 5 hours, 6 hours, 7 hours, 8 hours, 9 hours, 10 hours, 11 hours, 12 hours, 1 day, 2 days, 3 days, 4 days, 5 days, 6 days, 7 days, 8 days, 9, days, 10 days, 11 days, 12 days, 13 days, 14 days, 15 days, 16 days, 17 days, 18 days, 19 days, 20 days, 21 days, 22 days, 23 days, 24 days, 25 days, 26 days, 27 days, 28 days, 29 days, 30 days, 1 week, 2 weeks, three weeks, 4 weeks, 1 month, 2 months, 3 months, 4 months, 5 months, 6 months, 7 months, 8 months, 9 months, 10 months, 11 months, 12 months, or any combination thereof, before the peptidomimetic macrocycle is administered. For example, seliciclib, ribociclib, abemaciclib, or palbociclib can be administered about 1 hour, 2 hours, 3 hours, 4 hours, 5 hours, 6 hours, 7 hours, 8 hours, 9 hours, 10 hours, 11 hours, 12 hours, 1 day, 2 days, 3 days, 4 days, 5 days, 6 days, 7 days, 8 days, 9, days, 10 days, 11 days, 12 days, 13 days, 14 days, 15 days, 16 days, 17 days, 18 days, 19 days, 20 days, 21 days, 22 days, 23 days, 24 days, 25 days, 26 days, 27 days, 28 days, 29 days, 30 days, 1 week, 2 weeks, 3 weeks, 4 weeks, 1 month, 2 months, 3 months, 4 months, 5 months, 6 months, 7 months, 8 months, 9 months, 10 months, 11 months, 12 months, or any combination thereof, before the peptidomimetic macrocycle is administered.

[0549] Also, contemplated herein is a drug holiday utilized among the administration of a peptidomimetic macrocycle and an additional pharmaceutically-active agent, for example, any additional therapeutic agent described herein. A drug holiday can be a period of days after the administration of the additional pharmaceutically-active agent, for example, any additional therapeutic agent described herein, and before the administration of a peptidomimetic macrocycle. A drug holiday can be a period of days after the administration of a peptidomimetic macrocycle and before the administration of the additional pharmaceutically-active agent, for example, any additional therapeutic agent described herein. A drug holiday can be a period of days after the sequential administration of one or more of a peptidomimetic macrocycle and an additional pharmaceutically-active agent, for example, any additional therapeutic agent described herein, and before the administration of the peptidomimetic macrocycle, the additional pharmaceutically-active agent or another therapeutic agent. For example, a drug holiday can be a period of days after the sequential administration of a peptidomimetic macrocycle first, followed administration of an additional pharmaceutically-active agent, for example, any additional therapeutic agent described herein, and before the administration of the peptidomimetic macrocycle again. For example, a drug holiday can be a period of days after the sequential administration of an additional pharmaceutically-active agent first, followed administration of a peptidomimetic macrocycle and before the administration of the additional pharmaceutically-active agent, for example, any additional therapeutic agent described herein.

[0550] Suitably the drug holiday will be a period of 1 day, 2 days, 3 days, 4 days, 5 days, 6 days, 7 days, 8 days, 9 days, 10 days, 11 days, 12 days, 13 days or 14 days; or from 1-24, 2-24, 3-24, 4-24, 5-24, 6-24, 7-24, 8-24, 9-24, 10-24, 11-24, or 12-24 hours; from 1-30, 2-30, 3-30, 4-30, 5-30, 6-30, 7-30, 8-30, 9-30, 10-30, 11-30, 12-30, 13-30, 14-30, 15-30, 16-30, 17-30, 18-30, 19-30, 20-30, 21-30, 22-30, 23-30, 24-30, 25-30, 26-30, 27-30, 28-30, or 29-30 days, 1-4, 2-4, or 3-4 weeks; or from 1-12, 2-12, 3-12, 4-12, 5-12, 6-12, 7-12, 8-12, 9-12, 10-12, or 11-12 months.

[0551] In some embodiments, an additional pharmaceutically-active agent, for example, any additional therapeutic agent described herein, will be administered first in the sequence, followed by an optional drug holiday, followed by administration of a peptidomimetic macrocycle. In some embodiments, an additional pharmaceutically-active agent, for example, any additional therapeutic agent described herein, will be administered first in the sequence, followed by administration of a peptidomimetic macrocycle, followed by an optional drug holiday, followed by administration of an additional pharmaceutically-active agent.

[0552] In some embodiments, an additional pharmaceutically-active agent, for example, any additional therapeutic agent described herein, is administered for from 1-24, 2-24, 3-24, 4-24, 5-24, 6-24, 7-24, 8-24, 9-24, 10-24, 11-24, or 12-24 consecutive hours; from 1-30, 2-30, 3-30, 4-30, 5-30, 6-30, 7-30, 8-30, 9-30, 10-30, 11-30, 12-30, 13-30, 14-30, 15-30, 16-30, 17-30, 18-30, 19-30, 20-30, 21-30, 22-30, 23-30, 24-30, 25-30, 26-30, 27-30, 28-30, or 29-30 consecutive days, 1-4, 2-4, or 3-4 consecutive weeks; or from 1-12, 2-12, 3-12, 4-12, 5-12, 6-12, 7-12, 8-12, 9-12, 10-12, or 11-12 consecutive months, followed by an optional drug holiday; followed by administration of a peptidomimetic macrocycle for from 1-24, 2-24, 3-24, 4-24, 5-24, 6-24, 7-24, 8-24, 9-24, 10-24, 11-24, or 12-24 consecutive hours; from 1-30, 2-30, 3-30, 4-30, 5-30, 6-30, 7-30, 8-30, 9-30, 10-30, 11-30, 12-30, 13-30, 14-30, 15-30, 16-30, 17-30, 18-30, 19-30, 20-30, 21-30, 22-30, 23-30, 24-30, 25-30, 26-30, 27-30, 28-30, or 29-30 consecutive days, 1-4, 2-4, or 3-4 consecutive weeks; or from 1-12, 2-12, 3-12, 4-12, 5-12, 6-12, 7-12, 8-12, 9-12, 10-12, or 11-12 consecutive months. For example, a cyclin dependent kinase inhibitor is administered for from 1-24, 2-24, 3-24, 4-24, 5-24, 6-24, 7-24, 8-24, 9-24, 10-24, 11-24, or 12-24 consecutive hours; from 1-30, 2-30, 3-30, 4-30, 5-30, 6-30, 7-30, 8-30, 9-30, 10-30, 11-30, 12-30, 13-30, 14-30, 15-30, 16-30, 17-30, 18-30, 19-30, 20-30, 21-30, 22-30, 23-30, 24-30, 25-30, 26-30, 27-30, 28-30, or 29-30 consecutive days, 1-4, 2-4, or 3-4 consecutive weeks; or from 1-12, 2-12, 3-12, 4-12, 5-12, 6-12, 7-12, 8-12, 9-12, 10-12, or 11-12 consecutive months; followed by a drug holiday of from 1-24, 2-24, 3-24, 4-24, 5-24, 6-24, 7-24, 8-24, 9-24, 10-24, 11-24, or 12-24 consecutive hours; from 1-30, 2-30, 3-30, 4-30, 5-30, 6-30, 7-30, 8-30, 9-30, 10-30, 11-30, 12-30, 13-30, 14-30, 15-30, 16-30, 17-30, 18-30, 19-30, 20-30, 21-30, 22-30, 23-30, 24-30, 25-30, 26-30, 27-30, 28-30, or 29-30 consecutive days, 1-4, 2-4, or 3-4 consecutive weeks; or from 1-12, 2-12, 3-12, 4-12, 5-12, 6-12, 7-12, 8-12, 9-12, 10-12, or 11-12 consecutive months; followed by administration of a peptidomimetic macrocycle for from 1-24, 2-24, 3-24, 4-24, 5-24, 6-24, 7-24, 8-24, 9-24, 10-24, 11-24, or 12-24 consecutive hours; from 1-30, 2-30, 3-30, 4-30, 5-30, 6-30, 7-30, 8-30, 9-30, 10-30, 11-30, 12-30, 13-30, 14-30, 15-30, 16-30, 17-30, 18-30, 19-30, 20-30, 21-30, 22-30, 23-30, 24-30, 25-30, 26-30, 27-30, 28-30, or 29-30 consecutive days, 1-4, 2-4, or 3-4 consecutive weeks; or from 1-12, 2-12, 3-12, 4-12, 5-12, 6-12, 7-12, 8-12, 9-12, 10-12, or 11-12 consecutive months.

[0553] In some embodiments, an additional pharmaceutically-active agent, for example, any additional therapeutic agent described herein, is administered for from 1-24, 2-24, 3-24, 4-24, 5-24, 6-24, 7-24, 8-24, 9-24, 10-24, 11-24, or 12-24 consecutive hours; from 1-30, 2-30, 3-30, 4-30, 5-30, 6-30, 7-30, 8-30, 9-30, 10-30, 11-30, 12-30, 13-30, 14-30, 15-30, 16-30, 17-30, 18-30, 19-30, 20-30, 21-30, 22-30, 23-30, 24-30, 25-30, 26-30, 27-30, 28-30, or 29-30 consecutive days, 1-4, 2-4, or 3-4 consecutive weeks; or from 1-12, 2-12, 3-12, 4-12, 5-12, 6-12, 7-12, 8-12, 9-12, 10-12, or 11-12 consecutive months, followed by administration of a peptidomimetic macrocycle for from 1-24, 2-24, 3-24, 4-24, 5-24, 6-24, 7-24, 8-24, 9-24, 10-24, 11-24, or 12-24 consecutive hours; from 1-30, 2-30, 3-30, 4-30, 5-30, 6-30, 7-30, 8-30, 9-30, 10-30, 11-30, 12-30, 13-30, 14-30, 15-30, 16-30, 17-30, 18-30, 19-30, 20-30, 21-30, 22-30, 23-30, 24-30, 25-30, 26-30, 27-30, 28-30, or 29-30 consecutive days, 1-4, 2-4, or 3-4 consecutive weeks; or from 1-12, 2-12, 3-12, 4-12, 5-12, 6-12, 7-12, 8-12, 9-12, 10-12, or 11-12 consecutive months, followed by an optional drug holiday; followed by administration of an additional pharmaceutically-active agent. For example, a cyclin dependent kinase inhibitor is administered for from 1-24, 2-24, 3-24, 4-24, 5-24, 6-24, 7-24, 8-24, 9-24, 10-24, 11-24, or 12-24 consecutive hours; from 1-30, 2-30, 3-30, 4-30, 5-30, 6-30, 7-30, 8-30, 9-30, 10-30, 11-30, 12-30, 13-30, 14-30, 15-30, 16-30, 17-30, 18-30, 19-30, 20-30, 21-30, 22-30, 23-30, 24-30, 25-30, 26-30, 27-30, 28-30, or 29-30 consecutive days, 1-4, 2-4, or 3-4 consecutive weeks; or from 1-12, 2-12, 3-12, 4-12, 5-12, 6-12, 7-12, 8-12, 9-12, 10-12, or 11-12 consecutive months; followed by administration of a peptidomimetic macrocycle for from 1-24, 2-24, 3-24, 4-24, 5-24, 6-24, 7-24, 8-24, 9-24, 10-24, 11-24, or 12-24 consecutive hours; from 1-30, 2-30, 3-30, 4-30, 5-30, 6-30, 7-30, 8-30, 9-30, 10-30, 11-30, 12-30, 13-30, 14-30, 15-30, 16-30, 17-30, 18-30, 19-30, 20-30, 21-30, 22-30, 23-30, 24-30, 25-30, 26-30, 27-30, 28-30, or 29-30 consecutive days, 1-4, 2-4, or 3-4 consecutive weeks; or from 1-12, 2-12, 3-12, 4-12, 5-12, 6-12, 7-12, 8-12, 9-12, 10-12, or 11-12 consecutive months, followed by an optional drug holiday of from 1-24, 2-24, 3-24, 4-24, 5-24, 6-24, 7-24, 8-24, 9-24, 10-24, 11-24, or 12-24 consecutive hours; from 1-30, 2-30, 3-30, 4-30, 5-30, 6-30, 7-30, 8-30, 9-30, 10-30, 11-30, 12-30, 13-30, 14-30, 15-30, 16-30, 17-30, 18-30, 19-30, 20-30, 21-30, 22-30, 23-30, 24-30, 25-30, 26-30, 27-30, 28-30, or 29-30 consecutive days, 1-4, 2-4, or 3-4 consecutive weeks; or from 1-12, 2-12, 3-12, 4-12, 5-12, 6-12, 7-12, 8-12, 9-12, 10-12, or 11-12 consecutive months; followed by administration of a cyclin dependent kinase inhibitor.

[0554] In some embodiments, a peptidomimetic macrocycle will be administered first in the sequence, followed by an optional drug holiday, followed by administration of an additional pharmaceutically-active agent, for example, any additional therapeutic agent described herein. In some embodiments, a peptidomimetic macrocycle will be administered first in the sequence, followed by administration of an additional pharmaceutically-active agent, for example, any additional therapeutic agent described herein, followed by an optional drug holiday, followed by administration of a peptidomimetic macrocycle.

[0555] In some embodiments, a peptidomimetic macrocycle is administered for from 1-24, 2-24, 3-24, 4-24, 5-24, 6-24, 7-24, 8-24, 9-24, 10-24, 11-24, or 12-24 consecutive hours; from 1-30, 2-30, 3-30, 4-30, 5-30, 6-30, 7-30, 8-30, 9-30, 10-30, 11-30, 12-30, 13-30, 14-30, 15-30, 16-30, 17-30, 18-30, 19-30, 20-30, 21-30, 22-30, 23-30, 24-30, 25-30, 26-30, 27-30, 28-30, or 29-30 consecutive days, 1-4, 2-4, or 3-4 consecutive weeks; or from 1-12, 2-12, 3-12, 4-12, 5-12, 6-12, 7-12, 8-12, 9-12, 10-12, or 11-12 consecutive months, followed by an optional drug holiday; followed by administration of an additional pharmaceutically-active agent, for example, any additional therapeutic agent described herein, for from 1-24, 2-24, 3-24, 4-24, 5-24, 6-24, 7-24, 8-24, 9-24, 10-24, 11-24, or 12-24 consecutive hours; from 1-30, 2-30, 3-30, 4-30, 5-30, 6-30, 7-30, 8-30, 9-30, 10-30, 11-30, 12-30, 13-30, 14-30, 15-30, 16-30, 17-30, 18-30, 19-30, 20-30, 21-30, 22-30, 23-30, 24-30, 25-30, 26-30, 27-30, 28-30, or 29-30 consecutive days, 1-4, 2-4, or 3-4 consecutive weeks; or from 1-12, 2-12, 3-12, 4-12, 5-12, 6-12, 7-12, 8-12, 9-12, 10-12, or 11-12 consecutive months. For example, a peptidomimetic macrocycle is administered for from 1-24, 2-24, 3-24, 4-24, 5-24, 6-24, 7-24, 8-24, 9-24, 10-24, 11-24, or 12-24 consecutive hours; from 1-30, 2-30, 3-30, 4-30, 5-30, 6-30, 7-30, 8-30, 9-30, 10-30, 11-30, 12-30, 13-30, 14-30, 15-30, 16-30, 17-30, 18-30, 19-30, 20-30, 21-30, 22-30, 23-30, 24-30, 25-30, 26-30, 27-30, 28-30, or 29-30 consecutive days, 1-4, 2-4, or 3-4 consecutive weeks; or from 1-12, 2-12, 3-12, 4-12, 5-12, 6-12, 7-12, 8-12, 9-12, 10-12, or 11-12 consecutive months; followed by a drug holiday of from 1-24, 2-24, 3-24, 4-24, 5-24, 6-24, 7-24, 8-24, 9-24, 10-24, 11-24, or 12-24 consecutive hours; from 1-30, 2-30, 3-30, 4-30, 5-30, 6-30, 7-30, 8-30, 9-30, 10-30, 11-30, 12-30, 13-30, 14-30, 15-30, 16-30, 17-30, 18-30, 19-30, 20-30, 21-30, 22-30, 23-30, 24-30, 25-30, 26-30, 27-30, 28-30, or 29-30 consecutive days, 1-4, 2-4, or 3-4 consecutive weeks; or from 1-12, 2-12, 3-12, 4-12, 5-12, 6-12, 7-12, 8-12, 9-12, 10-12, or 11-12 consecutive months; followed by administration of a cyclin dependent kinase inhibitor for from 1-24, 2-24, 3-24, 4-24, 5-24, 6-24, 7-24, 8-24, 9-24, 10-24, 11-24, or 12-24 consecutive hours; from 1-30, 2-30, 3-30, 4-30, 5-30, 6-30, 7-30, 8-30, 9-30, 10-30, 11-30, 12-30, 13-30, 14-30, 15-30, 16-30, 17-30, 18-30, 19-30, 20-30, 21-30, 22-30, 23-30, 24-30, 25-30, 26-30, 27-30, 28-30, or 29-30 consecutive days, 1-4, 2-4, or 3-4 consecutive weeks; or from 1-12, 2-12, 3-12, 4-12, 5-12, 6-12, 7-12, 8-12, 9-12, 10-12, or 11-12 consecutive months

[0556] In some embodiments, a peptidomimetic macrocycle is administered for from 1-24, 2-24, 3-24, 4-24, 5-24, 6-24, 7-24, 8-24, 9-24, 10-24, 11-24, or 12-24 consecutive hours; from 1-30, 2-30, 3-30, 4-30, 5-30, 6-30, 7-30, 8-30, 9-30, 10-30, 11-30, 12-30, 13-30, 14-30, 15-30, 16-30, 17-30, 18-30, 19-30, 20-30, 21-30, 22-30, 23-30, 24-30, 25-30, 26-30, 27-30, 28-30, or 29-30 consecutive days, 1-4, 2-4, or 3-4 consecutive weeks; or from 1-12, 2-12, 3-12, 4-12, 5-12, 6-12, 7-12, 8-12, 9-12, 10-12, or 11-12 consecutive months, followed by administration of an additional pharmaceutically-active agent, for example, any additional therapeutic agent described herein, for from 1-24, 2-24, 3-24, 4-24, 5-24, 6-24, 7-24, 8-24, 9-24, 10-24, 11-24, or 12-24 consecutive hours; from 1-30, 2-30, 3-30, 4-30, 5-30, 6-30, 7-30, 8-30, 9-30, 10-30, 11-30, 12-30, 13-30, 14-30, 15-30, 16-30, 17-30, 18-30, 19-30, 20-30, 21-30, 22-30, 23-30, 24-30, 25-30, 26-30, 27-30, 28-30, or 29-30 consecutive days, 1-4, 2-4, or 3-4 consecutive weeks; or from 1-12, 2-12, 3-12, 4-12, 5-12, 6-12, 7-12, 8-12, 9-12, 10-12, or 11-12 consecutive months, followed by an optional drug holiday; followed by administration of a peptidomimetic macrocycle. For example, a peptidomimetic macrocycle is administered for from 1-24, 2-24, 3-24, 4-24, 5-24, 6-24, 7-24, 8-24, 9-24, 10-24, 11-24, or 12-24 consecutive hours; from 1-30, 2-30, 3-30, 4-30, 5-30, 6-30, 7-30, 8-30, 9-30, 10-30, 11-30, 12-30, 13-30, 14-30, 15-30, 16-30, 17-30, 18-30, 19-30, 20-30, 21-30, 22-30, 23-30, 24-30, 25-30, 26-30, 27-30, 28-30, or 29-30 consecutive days, 1-4, 2-4, or 3-4 consecutive weeks; or from 1-12, 2-12, 3-12, 4-12, 5-12, 6-12, 7-12, 8-12, 9-12, 10-12, or 11-12 consecutive months; followed by administration of a cyclin dependent kinase inhibitor for from 1-24, 2-24, 3-24, 4-24, 5-24, 6-24, 7-24, 8-24, 9-24, 10-24, 11-24, or 12-24 consecutive hours; from 1-30, 2-30, 3-30, 4-30, 5-30, 6-30, 7-30, 8-30, 9-30, 10-30, 11-30, 12-30, 13-30, 14-30, 15-30, 16-30, 17-30, 18-30, 19-30, 20-30, 21-30, 22-30, 23-30, 24-30, 25-30, 26-30, 27-30, 28-30, or 29-30 consecutive days, 1-4, 2-4, or 3-4 consecutive weeks; or from 1-12, 2-12, 3-12, 4-12, 5-12, 6-12, 7-12, 8-12, 9-12, 10-12, or 11-12 consecutive months, followed by an optional drug holiday of from 1-24, 2-24, 3-24, 4-24, 5-24, 6-24, 7-24, 8-24, 9-24, 10-24, 11-24, or 12-24 consecutive hours; from 1-30, 2-30, 3-30, 4-30, 5-30, 6-30, 7-30, 8-30, 9-30, 10-30, 11-30, 12-30, 13-30, 14-30, 15-30, 16-30, 17-30, 18-30, 19-30, 20-30, 21-30, 22-30, 23-30, 24-30, 25-30, 26-30, 27-30, 28-30, or 29-30 consecutive days, 1-4, 2-4, or 3-4 consecutive weeks; or from 1-12, 2-12, 3-12, 4-12, 5-12, 6-12, 7-12, 8-12, 9-12, 10-12, or 11-12 consecutive months; followed by administration of a peptidomimetic macrocycle.

[0557] In some embodiments, an additional pharmaceutically-active agent, for example, any additional therapeutic agent described herein, will be administered first in the sequence, followed by an optional drug holiday, followed by administration of a peptidomimetic macrocycle. In some embodiments, a cyclin dependent kinase inhibitor will be administered first in the sequence, followed by an optional drug holiday, followed by administration of a peptidomimetic macrocycle, followed by an optional drug holiday, followed by administration of a cyclin dependent kinase inhibitor.

[0558] In some embodiments, an additional pharmaceutically-active agent, for example, any additional therapeutic agent described herein, is administered for from 1 to 30 consecutive days, followed by an optional drug holiday, followed by administration of peptidomimetic macrocycle for from 1 to 30 consecutive days. In some embodiments, an additional pharmaceutically-active agent, for example, any additional therapeutic agent described herein, is administered for from 1 to 21 consecutive days, followed by an optional drug holiday, followed by administration of a peptidomimetic macrocycle for from 1 to 21 consecutive days. In some embodiments, an additional pharmaceutically-active agent, for example, any additional therapeutic agent described herein, is administered for from 1 to 14 consecutive days, followed by an optional drug holiday, followed by administration of a peptidomimetic macrocycle for from 1 to 14 consecutive days. In some embodiments, an additional pharmaceutically-active agent, for example, any additional therapeutic agent described herein, is administered for 14 consecutive days, followed by an optional drug holiday, followed by administration of a peptidomimetic macrocycle for 7 consecutive days. In some embodiments, an additional pharmaceutically-active agent, for example, any additional therapeutic agent described herein, is administered for 7 consecutive days, followed by an optional drug holiday, followed by administration of a peptidomimetic macrocycle for 7 consecutive days.

[0559] In some embodiments, a peptidomimetic macrocycle is administered for from 1 to 30 consecutive days, followed by an optional drug holiday, followed by administration of an additional pharmaceutically-active agent, for example, any additional therapeutic agent described herein, for from 1 to 30 consecutive days. In some embodiments, a peptidomimetic macrocycle is administered for from 1 to 21 consecutive days, followed by an optional drug holiday, followed by administration of an additional pharmaceutically-active agent, for example, any additional therapeutic agent described herein, for from 1 to 21 consecutive days. In some embodiments, a peptidomimetic macrocycle is administered for from 1 to 14 consecutive days, followed by an optional drug holiday, followed by administration of an additional pharmaceutically-active agent, for example, any additional therapeutic agent described herein, for from 1 to 14 consecutive days. In some embodiments, a peptidomimetic macrocycle is administered for 14 consecutive days, followed by an optional drug holiday, followed by administration of an additional pharmaceutically-active agent, for example, any additional therapeutic agent described herein, for 14 consecutive days. In some embodiments, a peptidomimetic macrocycle is administered for 7 consecutive days, followed by an optional drug holiday, followed by administration of an additional pharmaceutically-active agent, for example, any additional therapeutic agent described herein, for 7 consecutive days.

[0560] In some embodiments, one of a peptidomimetic macrocycle and an additional pharmaceutically-active agent, for example, any additional therapeutic agent described herein, is administered for from 2 to 30 consecutive days, followed by an optional drug holiday, followed by administration of the other of a peptidomimetic macrocycle and an additional pharmaceutically-active agent for from 2 to 30 consecutive days. In some embodiments, one of a peptidomimetic macrocycle and an additional pharmaceutically-active agent, for example, any additional therapeutic agent described herein, is administered for from 2 to 21 consecutive days, followed by an optional drug holiday, followed by administration of the other of a peptidomimetic macrocycle and an additional pharmaceutically-active agent for from 2 to 21 consecutive days. In some embodiments, one of a peptidomimetic macrocycle and an additional pharmaceutically-active agent, for example, any additional therapeutic agent described herein, is administered for from 2 to 14 consecutive days, followed by a drug holiday of from 1 to 14 days, followed by administration of the other of a peptidomimetic macrocycle and an additional pharmaceutically-active agent for from 2 to 14 consecutive days. In some embodiments, one of a peptidomimetic macrocycle and an additional pharmaceutically-active agent, for example, any additional therapeutic agent described herein, is administered for from 3 to 7 consecutive days, followed by a drug holiday of from 3 to 10 days, followed by administration of the other of a peptidomimetic macrocycle and an additional pharmaceutically-active agent for from 3 to 7 consecutive days.

[0561] In some embodiments, a cyclin dependent kinase inhibitor will be administered first in the sequence, followed by an optional drug holiday, followed by administration of a peptidomimetic macrocycle. In some embodiments, a cyclin dependent kinase inhibitor is administered for from 3 to 21 consecutive days, followed by an optional drug holiday, followed by administration of a peptidomimetic macrocycle for from 3 to 21 consecutive days. In some embodiments, a cyclin dependent kinase inhibitor is administered for from 3 to 21 consecutive days, followed by a drug holiday of from 1 to 14 days, followed by administration of a peptidomimetic macrocycle for from 3 to 21 consecutive days. In some embodiments, a cyclin dependent kinase inhibitor is administered for from 3 to 21 consecutive days, followed by a drug holiday of from 3 to 14 days, followed by administration of a peptidomimetic macrocycle for from 3 to 21 consecutive days. In some embodiments, a cyclin dependent kinase inhibitor is administered for 21 consecutive days, followed by an optional drug holiday, followed by administration of a peptidomimetic macrocycle for 14 consecutive days. In some embodiments, a cyclin dependent kinase inhibitor is administered for 14 consecutive days, followed by a drug holiday of from 1 to 14 days, followed by administration of a peptidomimetic macrocycle for 14 consecutive days. In some embodiments, a cyclin dependent kinase inhibitor is administered for 7 consecutive days, followed by a drug holiday of from 3 to 10 days, followed by administration of a peptidomimetic macrocycle for 7 consecutive days. In some embodiments, a cyclin dependent kinase inhibitor is administered for 3 consecutive days, followed by a drug holiday of from 3 to 14 days, followed by administration of a peptidomimetic macrocycle for 7 consecutive days. In some embodiments, a cyclin dependent kinase inhibitor is administered for 3 consecutive days, followed by a drug holiday of from 3 to 10 days, followed by administration of a peptidomimetic macrocycle for 3 consecutive days.

[0562] In some embodiments, a peptidomimetic macrocycle will be administered first in the sequence, followed by an optional drug holiday, followed by administration of a cyclin dependent kinase inhibitor. In some embodiments, a peptidomimetic macrocycle is administered for from 3 to 21 consecutive days, followed by an optional drug holiday, followed by administration of a cyclin dependent kinase inhibitor for from 3 to 21 consecutive days. In some embodiments, a peptidomimetic macrocycle is administered for from 3 to 21 consecutive days, followed by a drug holiday of from 1 to 14 days, followed by administration of a cyclin dependent kinase inhibitor for from 3 to 21 consecutive days. In some embodiments, a peptidomimetic macrocycle is administered for from 3 to 21 consecutive days, followed by a drug holiday of from 3 to 14 days, followed by administration of a cyclin dependent kinase inhibitor for from 3 to 21 consecutive days. In some embodiments, a peptidomimetic macrocycle is administered for 21 consecutive days, followed by an optional drug holiday, followed by administration of a cyclin dependent kinase inhibitor for 14 consecutive days. In some embodiments, a peptidomimetic macrocycle s administered for 14 consecutive days, followed by a drug holiday of from 1 to 14 days, followed by administration of a cyclin dependent kinase inhibitor for 14 consecutive days. In some embodiments, a peptidomimetic macrocycle is administered for 7 consecutive days, followed by a drug holiday of from 3 to 10 days, followed by administration of a cyclin dependent kinase inhibitor for 7 consecutive days. In some embodiments, a peptidomimetic macrocycle is administered for 3 consecutive days, followed by a drug holiday of from 3 to 14 days, followed by administration of a cyclin dependent kinase inhibitor for 7 consecutive days. In some embodiments, a peptidomimetic macrocycle is administered for 3 consecutive days, followed by a drug holiday of from 3 to 10 days, followed by administration of a cyclin dependent kinase inhibitor for 3 consecutive days.

[0563] In some embodiments, a peptidomimetic macrocycle is administered once, twice, or thrice daily for 2, 3, 4, 5, 6, 7, 8, 9, 10, 11, 12, 13, 14, 15, 16, 17, 18, 19, 20, 21, 22, 23, 24, 25, 26, 27, 28, 29, or 30, consecutive days followed by 1, 2, 3, 4, 5, 6, 7, 8, 9, 10, 11, 12, 13, 14, 15, 16, 17, 18, 19, 20, 21, 22, 23, 24, 25, 26, 27, 28, 29, or 30 days of rest (e.g., no administration of the peptidomimetic macrocycle/discontinuation of treatment) in a 1, 2, 3, 4, 5, 6, 7, 8, 9, 10, 11, 12, 13, 14, 15, 16, 17, 18, 19, 20, 21, 22, 23, 24, 25, 26, 27, or 28 day cycle; and the additional pharmaceutically-active agent, for example, any additional therapeutic agent described herein, is administered prior to, concomitantly with, or subsequent to administration of the peptidomimetic macrocycle on one or more days (e.g., on day 1 of cycle 1). In some embodiments, the combination therapy is administered for 1, 2, 3, 4, 5, 6, 7, 8, 9, 10, 12, or 13 cycles of 1, 2, 3, 4, 5, 6, 7, 8, 9, 10, 11, 12, 13, 14, 15, 16, 17, 18, 19, 20, 21, 22, 23, 24, 25, 26, 27, or 28 days. In some embodiments, the combination therapy is administered for 1 to 12 or 13 cycles of 28 days (e.g., about 12 months).

[0564] In some embodiments, provided herein is a method of treating a condition or disease comprising administering to a patient in need thereof a therapeutically effective amount of a peptidomimetic macrocycle in combination with a therapeutically effective amount of an additional pharmaceutically-active agent, for example, any additional therapeutic agent described herein, and a secondary active agent, such as a checkpoint inhibitor. In some embodiments, a peptidomimetic macrocycle is administered once, twice, or thrice daily for 2, 3, 4, 5, 6, 7, 8, 9, 10, 11, 12, 13, 14, 15, 16, 17, 18, 19, 20, 21, 22, 23, 24, 25, 26, 27, 28, 29, or 30, consecutive days followed by 1, 2, 3, 4, 5, 6, 7, 8, 9, 10, 11, 12, 13, 14, 15, 16, 17, 18, 19, 20, 21, 22, 23, 24, 25, 26, 27, 28, 29, or 30 days of rest (e.g., no administration of the peptidomimetic macrocycle/discontinuation of treatment) in a 1, 2, 3, 4, 5, 6, 7, 8, 9, 10, 11, 12, 13, 14, 15, 16, 17, 18, 19, 20, 21, 22, 23, 24, 25, 26, 27, or 28 day cycle; the additional pharmaceutically-active agent, for example, any additional therapeutic agent described herein, is administered prior to, concomitantly with, or subsequent to administration of the peptidomimetic macrocycle on one or more days (e.g., on day 1 of cycle 1), and the secondary agent is administered daily, weekly, or monthly. In some embodiments, the combination therapy is administered for 1, 2, 3, 4, 5, 6, 7, 8, 9, 10, 12, or 13 cycles of 1, 2, 3, 4, 5, 6, 7, 8, 9, 10, 11, 12, 13, 14, 15, 16, 17, 18, 19, 20, 21, 22, 23, 24, 25, 26, 27, or 28 days. In some embodiments, the combination therapy is administered for 1 to 12 or 13 cycles of 28 days (e.g., about 12 months).

[0565] In some embodiments, administration of a combination therapy as described herein modulates expression levels of at least one checkpoint protein (e.g., PD-L1). Thus, provided herein are methods of determining the expression of at least of checkpoint proteins, where the determination of the expression level is performed before, during, and/or after administration of a combination therapy described herein. The checkpoint protein expression levels determined before, during, and/or after administration of a combination therapy as described herein can be compared against each other or standard controls. Such comparisons can translate into determination of the efficacy of the administered treatment where in one embodiment a level of decreased expression of a given checkpoint protein indicates a greater effectiveness of the combination therapy. In some embodiments, treatment using the combination therapies described herein can be monitored or determined using assays to determine expression levels of checkpoint proteins (e.g., PD-L1, TIM-3, LAG-3, CTLA-4, OX40, Treg, CD25, CD127, FoxP3). Determining the expression of such checkpoint proteins can be performed before, during, or after completion of treatment with a combination therapy described herein. Expression can be determined using techniques known in the art, including for example flow-cytometry.

[0566] In some embodiments, the components of the combination therapies described herein (e.g., a peptidomimetic macrocycle and a cyclin dependent kinase inhibitor) are cyclically administered to a patient. In some embodiments, a secondary active agent is co-administered in a cyclic administration with the combination therapies provided herein. Cycling therapy involves the administration of an active agent for a period of time, followed by a rest for a period of time, and repeating this sequential administration. Cycling therapy can be performed independently for each active agent (e.g., a peptidomimetic macrocycle and a cyclin dependent kinase inhibitor, and/or a secondary agent) over a prescribed duration of time. In some embodiments, the cyclic administration of each active agent is dependent upon one or more of the active agents administered to the subject. In some embodiments, administration of a peptidomimetic macrocycle or a cyclin dependent kinase inhibitor fixes the day(s) or duration of administration of each agent. In some embodiments, administration of a peptidomimetic macrocycle or a cyclin dependent kinase inhibitor fixes the days(s) or duration of administration of a secondary active agent.

[0567] In some embodiments, a peptidomimetic macrocycle, a cyclin dependent kinase inhibitor, and/or a secondary active agent is administered continually (e.g., daily, weekly, monthly) without a rest period. Cycling therapy can reduce the development of resistance to one or more of the therapies, avoid, or reduce the side effects of one of the therapies, and/or improve the efficacy of the treatment or therapeutic agent.

[0568] In some embodiments, the frequency of administration is in the range of about a daily dose to about a monthly dose. In some embodiments, administration is once a day, twice a day, three times a day, four times a day, once every other day, twice a week, once every week, once every two weeks, once every three weeks, or once every four weeks. In some embodiments, a compound for use in combination therapies described herein is administered once a day. In some embodiments, a compound for use in combination therapies described herein is administered twice a day. In some embodiments, a compound for use in combination therapies described herein is administered three times a day. In some embodiments, a compound for use in combination therapies described herein is administered four times a day.

[0569] In some embodiments, the frequency of administration of a peptidomimetic macrocycle is in the range of about a daily dose to about a monthly dose. In some embodiments, administration of a peptidomimetic macrocycle is once a day, twice a day, three times a day, four times a day, once every other day, twice a week, once every week, once every two weeks, once every three weeks, or once every four weeks. In some embodiments, a peptidomimetic macrocycle for use in combination therapies described herein is administered once a day. In some embodiments, a peptidomimetic macrocycle for use in combination therapies described herein is administered twice a day. In some embodiments, a peptidomimetic macrocycle for use in combination therapies described herein is administered three times a day. In some embodiments, a peptidomimetic macrocycle for use in combination therapies described herein is administered four times a day.

[0570] In some embodiments, the frequency of administration of an additional pharmaceutically-active agent, for example, any additional therapeutic agent described herein, is in the range of about a daily dose to about a monthly dose. In some embodiments, administration of an additional pharmaceutically-active agent, for example, any additional therapeutic agent described herein, is once a day, twice a day, three times a day, four times a day, once every other day, twice a week, once every week, once every two weeks, once every three weeks, or once every four weeks. In some embodiments, an additional pharmaceutically-active agent, for example, any additional therapeutic agent described herein, for use in combination therapies described herein is administered once a day. In some embodiments, an additional pharmaceutically-active agent, for example, any additional therapeutic agent described herein, for use in combination therapies described herein is administered twice a day. In some embodiments, an additional pharmaceutically-active agent, for example, any additional therapeutic agent described herein, for use in combination therapies described herein is administered three times a day. In some embodiments, an additional pharmaceutically-active agent, for example, any additional therapeutic agent described herein, for use in combination therapies described herein is administered four times a day.

[0571] In some embodiments, a compound for use in combination therapies described herein is administered once per day from one day to six months, from one week to three months, from one week to four weeks, from one week to three weeks, or from one week to two weeks. In some embodiments, a compound for use in combination therapies described herein is administered once per day for one week, two weeks, three weeks, or four weeks. In some embodiments, a compound for use in combination therapies described herein is administered once per day for one week. In some embodiments, a compound for use in combination therapies described herein is administered once per day for two weeks. In some embodiments, a compound for use in combination therapies described herein is administered once per day for three weeks. In some embodiments, a compound for use in combination therapies described herein is administered once per day for four weeks.

[0572] Therapeutic compositions may be administered 1, 2, 3, 4, 5, 6, 7, 8, 9, 10, 11, 12, 13, 14, 15, 16, 17, 18, 19, 20 or more times, and they may be administered every 1, 2, 3, 4, 5, 6, 7, 8, 9, 10, 11, 12, 13, 14, 15, 16, 17, 18, 19, 20, 21, 22, 23, 24 hours, or 1, 2, 3, 4, 5, 6, 7 days, or 1, 2, 3, 4, 5 weeks, or 1, 2, 3, 4, 5, 6, 7, 8, 9, 10, 11, 12 months.

[0573] In some embodiments, the periodic administration of a peptidomimetic macrocycle and/or the additional pharmaceutically-active agent, for example, any additional therapeutic agent described herein, is effected daily. In some embodiments, the periodic administration of a peptidomimetic macrocycle and/or the additional pharmaceutically-active agent, for example, any additional therapeutic agent described herein, is effected twice daily at one half the amount.

[0574] In some embodiments, the periodic administration of a peptidomimetic macrocycle and/or the additional pharmaceutically-active agent, for example, any additional therapeutic agent described herein, is effected once every 3 to 11 days; or once every 5 to 9 days; or once every 7 days; or once every 24 hours. In some embodiments, the periodic administration of a peptidomimetic macrocycle and/or the additional pharmaceutically-active agent, for example, any additional therapeutic agent described herein, is effected once every 2 days, 3 days, 4 days, 5 days, 6 days, 7 days, 8 days, 9 days, 10 days, 11 days, 12 days, 13 days, 14 days, 15 days, 6 days, 16 days, 17 days, 18 days, 19 days, 20 days, 21 days, 22 days, 23 days, 24 days, 25 days, 26 days, 27 days, 28 days, 29 days, or 30 days.

[0575] In some embodiments, the periodic administration of a peptidomimetic macrocycle and/or additional pharmaceutically-active agent is effected one, twice, or thrice daily.

[0576] For each administration schedule of a peptidomimetic macrocycle, the periodic administration of the additional pharmaceutically-active agent, for example, any additional therapeutic agent described herein, may be effected once every 16-32 hours; or once every 18-30 hours; or once every 20-28 hours; or once every 22-26 hours. In some embodiments, the administration of a peptidomimetic macrocycle substantially precedes the additional pharmaceutically-active agent, for example, any additional therapeutic agent described herein. In some embodiments, the administration of the additional pharmaceutically-active agent, for example, any additional therapeutic agent described herein, substantially precedes the administration of a peptidomimetic macrocycle.

[0577] In some embodiments, a peptidomimetic macrocycle and the additional pharmaceutically-active agent, for example, any additional therapeutic agent described herein, may be administered for a period of time of at least 4 days. In some embodiments, the period of time may be 5 days to 5 years; or 10 days to 3 years; or 2 weeks to 1 year; or 1 month to 6 months; or 3 months to 4 months. In some embodiments, a peptidomimetic macrocycle and the additional pharmaceutically-active agent, for example, any additional therapeutic agent described herein, may be administered for the lifetime of the subject.

### Pharmaceutical Compositions for Combination Treatment

[0578] According to certain embodiments, the peptidomimetic macrocycles and the additional pharmaceutically-active agent, for example, any additional therapeutic agent described herein, are administered within a single pharmaceutical composition. In some embodiments, the peptidomimetic macrocycles of the invention and the additional pharmaceutically-active agent, for example, any additional therapeutic agent described herein, can be provided in a single unit dosage form for being taken together. According to some embodiments, the pharmaceutical composition further comprises pharmaceutically-acceptable diluents or carrier. According to certain embodiments, the peptidomimetic macrocycles and the additional pharmaceutically-active agent, for example, any additional therapeutic agent described herein, are administered within different pharmaceutical composition. In some embodiments, the peptidomimetic macrocycles of the invention and the additional pharmaceutically-active agent, for example, any additional therapeutic agent described herein, can be provided in a single unit dosage as separate entities (e.g., in separate containers) to be administered simultaneously or with a certain time difference. In some embodiments, the peptidomimetic macrocycles of the disclosure and the additional pharmaceutically-active agent, for example, any additional therapeutic agent described herein, can be administered via the same route of administration. In some embodiments, the peptidomimetic macrocycles of the disclosure and the additional pharmaceutically-active agent, for example, any additional therapeutic agent described herein, can be administered via the different route of administration.

[0579] In some embodiments, the at least one additional pharmaceutical agent, for example, any additional therapeutic agent described herein, is administered at the therapeutic amount known to be used for treating the specific type of cancer. In some embodiments, the at least one additional pharmaceutical agent, for example, any additional therapeutic agent described herein, is administered in an amount lower than the therapeutic amount known to be used for treating the disease, i.e. a sub-therapeutic amount of the at least one additional pharmaceutical agent is administered.

[0580] A peptidomimetic macrocycle of the disclosure and at least one additional pharmaceutical agent, for example, any additional therapeutic agent described herein, administered to the subject can each be from about 0.01 mg/kg to about 100 mg/kg per body weight of the subject. In some embodiments, a peptidomimetic macrocycle of the disclosure and the at least one additional pharmaceutical agent, for example, any additional therapeutic agent described herein, administered to the subject can each be from about 0.01 mg/kg to about 1 mg/kg, 0.01 mg/kg to about 10 mg/kg, 0.01 mg/kg to about 100 mg/kg, 0.1 mg to about 1 mg/kg, 0.1 mg/kg to about 10 mg/kg, or 0.1 mg/kg to about 100 mg/kg per body weight of the subject. In some embodiments, the doses of a peptidomimetic macrocycle and additional therapeutic agent, for example, any additional therapeutic agent described herein, can be administered as a single dose or as multiple doses.

### Sequence Homology

[0581] Two or more peptides can share a degree of homology. A pair of peptides can have, for example, up to about 20% pairwise homology, up to about 25% pairwise homology, up to about 30% pairwise homology, up to about 35% pairwise homology, up to about 40% pairwise homology, up to about 45% pairwise homology, up to about 50% pairwise homology, up to about 55% pairwise homology, up to about 60% pairwise homology, up to about 65% pairwise homology, up to about 70% pairwise homology, up to about 75% pairwise homology, up to about 80% pairwise homology, up to about 85% pairwise homology, up to about 90% pairwise homology, up to about 95% pairwise homology, up to about 96% pairwise homology, up to about 97% pairwise homology, up to about 98% pairwise homology, up to about 99% pairwise homology, up to about 99.5% pairwise homology, or up to about 99.9% pairwise homology. A pair of peptides can have, for example, at least about 20% pairwise homology, at least about 25% pairwise homology, at least about 30% pairwise homology, at least about 35% pairwise homology, at least about 40% pairwise homology, at least about 45% pairwise homology, at least about 50% pairwise homology, at least about 55% pairwise homology, at least about 60% pairwise homology, at least about 65% pairwise homology, at least about 70% pairwise homology, at least about 75% pairwise homology, at least about 80% pairwise homology, at least about 85% pairwise homology, at least about 90% pairwise homology, at least about 95% pairwise homology, at least about 96% pairwise homology, at least about 97% pairwise homology, at least about 98% pairwise homology, at least about 99% pairwise homology, at least about 99.5% pairwise homology, at least about 99.9% pairwise homology.

Methods of Detecting Wild Type p53 and/or p53 Mutations

[0582] In some embodiments, a subject lacking p53-deactivating mutations is a candidate for cancer treatment with a compound of the invention. Cancer cells from patient groups should be assayed in order to determine p53-deactivating mutations and/or expression of wild type p53 prior to treatment with a compound of the invention.

[0583] The activity of the p53 pathway can be determined by the mutational status of genes involved in the p53 pathways, including, for example, AKT1, AKT2, AKT3, ALK, BRAF, CDK4, CDKN2A, DDR2, EGFR, ERBB2 (HER2), FGFR1, FGFR3, GNA11, GNQ, GNAS, KDR, KIT, KRAS, MAP2K1 (MEK1), MET, HRAS, NOTCH1, NRAS, NTRK2, PIK3CA, NF1, PTEN, RAC1, RB1, NTRK3, STK11, PIK3R1, TSC1, TSC2, RET, TP53, and VHL. Genes that modulate the activity of p53 can also be assessed, including, for example, kinases: ABL1, JAK1, JAAK2, JAK3; receptor tyrosine kinases: FLT3 and KIT; receptors: CSF3R, IL7R, MPL, and NOTCH1; transcription factors: BCOR, CEBPA, CREBBP, ETV6, GATA1, GATA2. MLL, KZF1, PAX5, RUNX1, STAT3, WT1, and TP53; epigenetic factors: ASXL1, DNMT3A, EZH2, KDM6A (UTX), SUZ12, TET2, PTPN11, SF3B1, SRSF2, U2AF35, ZRSR2; RAS proteins: HRAS, KRAS, and NRAS; adaptors CBL and CBL-B; FBXW7, IDH1, IDH2, and NPM1.

[0584] Cancer cell samples can be obtained, for example, from solid or liquid tumors via primary or metastatic tumor resection (e.g. pneumonectomy, lobetomy, wedge resection, and craniotomy) primary or metastatic disease biopsy (e.g. transbronchial or needle core), pleural or ascites fluid (e.g. FFPE cell pellet), bone marrow aspirate, bone marrow clot, and bone marrow biopsy, or macro-dissection of tumor rich areas (solid tumors).

[0585] To detect the p53 wild type gene and/or lack of p53 deactivation mutation in a tissue, cancerous tissue can be isolated from surrounding normal tissues. For example, the tissue can be isolated from paraffin or cryostat sections. Cancer cells can also be separated from normal cells by flow cytometry. If the cancer cells tissue is highly contaminated with normal cells, detection of mutations can be more difficult.

[0586] Various methods and assays for analyzing wild type p53 and/or p53 mutations are suitable for use in the invention. Non-limiting examples of assays include polymerase chain reaction (PCR), restriction fragment length polymorphism (RFLP), microarray, Southern Blot, Northern Blot, Western Blot, Eastern Blot, HandE staining, microscopic assessment of tumors, next-generation DNA sequencing (NGS) (e.g. extraction, purification, quantification, and amplification ofDNA, library preparation) immunohistochemistry, and fluorescent in situ hybridization (FISH).

[0587] A microarray allows a researcher to investigate multiple DNA sequences attached to a surface, for example, a DNA chip made of glass or silicon, or a polymeric bead or resin. The DNA sequences are hybridized with fluorescent or luminescent probes. The microarray can indicate the presence of oligonucleotide sequences in a sample based on hybridization of sample sequences to the probes, followed by washing and subsequent detection of the probes. Quantification of the fluorescent or luminescent signal indicates the presence of known oligonucleotide sequences in the sample.

[0588] PCR allows amplification of DNA oligomers rapidly, and can be used to identify an oligonucleotide sequence in a sample. PCR experiments involve contacting an oligonucleotide sample with a PCR mixture containing primers complementary to a target sequence, one or more DNA polymerase enzymes, deoxnucleotide triphosphate (dNTP) building blocks, including dATP, dGTP, dTTP, and dCTP, and suitable buffers, salts, and additives. If a sample contains an oligonucleotide sequence complementary to a pair of primers, the experiment amplifies the sample sequence, which can be collected and identified.

[0589] In some embodiments, an assay comprises amplifying a biomolecule from the cancer sample. The biomolecule can be a nucleic acid molecule, such as DNA or RNA. In some embodiments, the assay comprises circularization of a nucleic acid molecule, followed by digestion of the circularized nucleic acid molecule.

[0590] In some embodiments, the assay comprises contacting an organism, or a biochemical sample collected from an organism, such as a nucleic acid sample, with a library of oligonucleotides, such as PCR primers. The library can contain any number of oligonucleotide molecules. The oligonucleotide molecules can bind individual DNA or RNA motifs, or any combination of motifs described herein. The motifs can be any distance apart, and the distance can be known or unknown. In some embodiments, two or more oligonucleotides in the same library bind motifs a known distance apart in a parent nucleic acid sequence. Binding of the primers to the parent sequence can take place based on the complementarity of the primers to the parent sequence. Binding can take place, for example, under annealing, or under stringent conditions.

[0591] In some embodiments, the results of an assay are used to design a new oligonucleotide sequence for future use. In some embodiments, the results of an assay are used to design a new oligonucleotide library for future use. In some embodiments, the results of an assay are used to revise, refine, or update an existing oligonucleotide library for future use. For example, an assay can reveal that a previously-undocumented nucleic acid sequence is associated with the presence of a target material. This information can be used to design or redesign nucleic acid molecules and libraries.

[0592] In some embodiments, one or more nucleic acid molecules in a library comprise a barcode tag. In some embodiments, one or more of the nucleic acid molecules in a library comprise type I or type II restriction sites suitable for circularization and cutting an amplified sample nucleic acid sequence. Such primers can be used to circularize a PCR product and cut the PCR product to provide a product nucleic acid sequence with a sequence that is organized differently from the nucleic acid sequence native to the sample organism.

[0593] After a PCR experiment, the presence of an amplified sequence can be verified. Non-limiting examples of methods for finding an amplified sequence include DNA sequencing, whole transcriptome shotgun sequencing (WTSS, or RNA-seq), mass spectrometry (MS), microarray, pyrosequencing, column purification analysis, polyacrylamide gel electrophoresis, and index tag sequencing of a PCR product generated from an index-tagged primer.

[0594] In some embodiments, more than one nucleic acid sequence in the sample organism is amplified. Non-limiting examples of methods of separating different nucleic acid sequences in a PCR product mixture include column purification, high performance liquid chromatography (HPLC), HPLC/MS, polyacrylamide gel electrophoresis, size exclusion chromatography.

[0595] The amplified nucleic acid molecules can be identified by sequencing. Nucleic acid sequencing can be done on automated instrumentation. Sequencing experiments can be done in parallel to analyze tens, hundreds, or thousands of sequences simultaneously. Non-limiting examples of sequencing techniques follow.

[0596] In pyrosequencing, DNA is amplified within a water droplet containing a single DNA template bound to a primer-coated bead in an oil solution. Nucleotides are added to a growing sequence, and the addition of each base is evidenced by visual light.

[0597] Ion semiconductor sequencing detects the addition of a nucleic acid residue as an electrical signal associated with a hydrogen ion liberated during synthesis. A reaction well containing a template is flooded with the four types of nucleotide building blocks, one at a time. The timing of the electrical signal identifies which building block was added, and identifies the corresponding residue in the template.

[0598] DNA nanoball uses rolling circle replication to amplify DNA into nanoballs. Unchained sequencing by ligation of the nanoballs reveals the DNA sequence.

[0599] In a reversible dyes approach, nucleic acid molecules are annealed to primers on a slide and amplified. Four types of fluorescent dye residues, each complementary to a native nucleobase, are added, the residue complementary to the next base in the nucleic acid sequence is added, and unincorporated dyes are rinsed from the slide. Four types of reversible terminator bases (RT-bases) are added, and non-incorporated nucleotides are washed away. Fluorescence indicates the addition of a dye residue, thus identifying the complementary base in the template sequence. The dye residue is chemically removed, and the cycle repeats.

[0600] Detection of point mutations can be accomplished by molecular cloning of the p53 allele(s) present in the cancer cell tissue and sequencing that allele(s). Alternatively, the polymerase chain reaction can be used to amplify p53 gene sequences directly from a genomic DNA preparation from the cancer cell tissue. The DNA sequence of the amplified sequences can then be determined. Specific deletions of p53 genes can also be detected. For example, restriction fragment length polymorphism (RFLP) probes for the p53 gene or surrounding marker genes can be used to score loss of a p53 allele.

[0601] Loss of wild type p53 genes can also be detected on the basis of the loss of a wild type expression product of the p53 gene. Such expression products include both the mRNA as well as the p53 protein product itself. Point mutations can be detected by sequencing the mRNA directly or via molecular cloning of cDNA made from the mRNA. The sequence of the cloned cDNA can be determined using DNA sequencing techniques. The cDNA can also be sequenced via the polymerase chain reaction (PCR).

[0602] Alternatively, mismatch detection can be used to detect point mutations in the p53 gene or the mRNA product. The method can involve the use of a labeled riboprobe that is complementary to the human wild type p53 gene. The riboprobe and either mRNA or DNA isolated from the cancer cell tissue are annealed (hybridized) together and subsequently digested with the enzyme RNase A which is able to detect some mismatches in a duplex RNA structure. If a mismatch is detected by RNase A, the enzyme cleaves at the site of the mismatch. Thus, when the annealed RNA preparation is separated on an electrophoretic gel matrix, if a mismatch has been detected and cleaved by RNase A, an RNA product is seen that is smaller than the full-length duplex RNA for the riboprobe and the p53 mRNA or DNA. The riboprobe need not be the full length of the p53 mRNA or gene but can be a segment of either. If the riboprobe comprises only a segment of the p53 mRNA or gene it will be desirable to use a number of these probes to screen the whole mRNA sequence for mismatches.

[0603] In similar fashion, DNA probes can be used to detect mismatches, through enzymatic or chemical cleavage. Alternatively, mismatches can be detected by shifts in the electrophoretic mobility of mismatched duplexes relative to matched duplexes. With either riboprobes or DNA probes, the cellular mRNA or DNA which might contain a mutation can be amplified using PCR before hybridization.

[0604] DNA sequences of the p53 gene from the cancer cell tissue which have been amplified by use of polymerase chain reaction can also be screened using allele-specific probes. These probes are nucleic acid oligomers, each of which contains a region of the p53 gene sequence harboring a known mutation. For example, one oligomer can be about 30 nucleotides in length, corresponding to a portion of the p53 gene sequence. At the position coding for the 175th codon of p53 gene the oligomer encodes an alanine, rather than the wild type codon valine. By use of a battery of such allele-specific probes, the PCR amplification products can be screened to identify the presence of a previously identified mutation in the p53 gene. Hybridization of allele-specific probes with amplified p53 sequences can be performed, for example, on a nylon filter. Hybridization to a particular probe indicates the presence of the same mutation in the cancer cell tissue as in the allele-specific probe.

[0605] The identification of p53 gene structural changes in cancer cells can be facilitated through the application of a diverse series of high resolution, high throughput microarray platforms. Essentially two types of array include those that carry PCR products from cloned nucleic acids (e.g. cDNA, BACs, cosmids) and those that use oligonucleotides. The methods can provide a way to survey genome wide DNA copy number abnormalities and expression levels to allow correlations between losses, gains and amplifications in cancer cells with genes that are over- and under-expressed in the same samples. The gene expression arrays that provide estimates of mRNA levels in cancer cells have given rise to exon-specific arrays that can identify both gene expression levels, alternative splicing events and mRNA processing alterations.

[0606] Oligonucleotide arrays can be used to interrogate single nucleotide polymorphisms (SNPs) throughout the genome for linkage and association studies and these have been adapted to quantify copy number abnormalities and loss of heterozygosity events. DNA sequencing arrays can allow resequencing of chromosome regions, exomes, and whole genomes.

[0607] SNP-based arrays or other gene arrays or chips can determine the presence of wild type p53 allele and the structure of mutations. A single nucleotide polymorphism (SNP), a variation at a single site in DNA, is the most frequent type of variation in the genome. For example, there are an estimated 5-10 million SNPs in the human genome. SNPs can be synonymous or nonsynonymous substitutions. Synonymous SNP substitutions do not result in a change of amino acid in the protein due to the degeneracy of the genetic code, but can affect function in other ways. For example, a seemingly silent mutation in a gene that codes for a membrane transport protein can slow down translation, allowing the peptide chain to misfold, and produce a less functional mutant membrane transport protein. Nonsynonymous SNP substitutions can be missense substitutions or nonsense substitutions. Missense substitutions occur when a single base change results in change in amino acid sequence of the protein and malfunction thereof leads to disease. Nonsense substitutions occur when a point mutation results in a premature stop codon, or a nonsense codon in the transcribed mRNA, which results in a truncated and usually, nonfunctional, protein product. As SNPs are highly conserved throughout evolution and within a population, the map of SNPs serves as an excellent genotypic marker for research. SNP array is a useful tool to study the whole genome.

[0608] In addition, SNP array can be used for studying the Loss Of Heterozygosity (LOH). LOH is a form of allelic imbalance that can result from the complete loss of an allele or from an increase in copy number of one allele relative to the other. While other chip-based methods (e.g., comparative genomic hybridization can detect only genomic gains or deletions), SNP array has the additional advantage of detecting copy number neutral LOH due to uniparental disomy (UPD). In UPD, one allele or whole chromosome from one parent are missing leading to reduplication of the other parental allele (uni-parental=from one parent, disomy=duplicated). In a disease setting this occurrence can be pathologic when the wild type allele (e.g., from the mother) is missing and instead two copies of the heterozygous allele (e.g., from the father) are present. This usage of SNP array has a huge potential in cancer diagnostics as LOH is a prominent characteristic of most human cancers. SNP array technology have shown that cancers (e.g. gastric cancer, liver cancer, etc.) and hematologic malignancies (ALL, MDS, CML etc) have a high rate of LOH due to genomic deletions or UPD and genomic gains. In the present disclosure, using high density SNP array to detect LOH allows identification of pattern of allelic imbalance to determine the presence of wild type p53 allele.

[0609] Mutations of wild type p53 genes can also be detected on the basis of the mutation of a wild type expression product of the p53 gene. Such expression products include both the mRNA as well as the p53 protein product itself. Point mutations can be detected by sequencing the mRNA directly or via molecular cloning of cDNA made from the mRNA. The sequence of the cloned cDNA can be determined using DNA sequencing techniques. The cDNA can also be sequenced via the polymerase chain reaction (PCR). A panel of monoclonal antibodies could be used in which each of the epitopes involved in p53 functions are represented by a monoclonal antibody. Loss or perturbation of binding of a monoclonal antibody in the panel can indicate mutational alteration of the p53 protein and thus of the p53 gene itself. Mutant p53 genes or gene products can also be detected in body samples, including, for example, serum, stool, urine, and sputum. The same techniques discussed above for detection of mutant p53 genes or gene products in tissues can be applied to other body samples.

[0610] Loss of wild type p53 genes can also be detected by screening for loss of wild type p53 protein function. Although all of the functions which the p53 protein undoubtedly possesses have yet to be elucidated, at least two specific functions are known. Protein p53 binds to the SV40 large T antigen as well as to the adenovirus E1B antigen. Loss of the ability of the p53 protein to bind to either or both of these antigens indicates a mutational alteration in the protein which reflects a mutational alteration of the gene itself. Alternatively, a panel of monoclonal antibodies could be used in which each of the epitopes involved in p53 functions are represented by a monoclonal antibody. Loss or perturbation of binding of a monoclonal antibody in the panel would indicate mutational alteration of the p53 protein and thus of the p53 gene itself. Any method for detecting an altered p53 protein can be used to detect loss of wild type p53 genes.

### Assays

[0611] The properties of peptidomimetic macrocycles are assayed, for example, by using the methods described below. In some embodiments, a peptidomimetic macrocycle has improved biological properties relative to a corresponding polypeptide lacking the substituents described herein.

a. Assays to Determine α-Helicity

[0612] In solution, the secondary structure of polypeptides with α-helical domains will reach a dynamic equilibrium between random coil structures and α-helical structures, often expressed as a “percent helicity”. Thus, for example, alpha-helical domains are predominantly random coils in solution, with α-helical content usually under 25%. Peptidomimetic macrocycles with optimized linkers, on the other hand, possess, for example, an alpha-helicity that is at least two-fold greater than that of a corresponding uncrosslinked polypeptide. In some embodiments, macrocycles will possess an alpha-helicity of greater than 50%. To assay the helicity of peptidomimetic macrocycles, the compounds are dissolved in an aqueous solution (e.g. 50 mM potassium phosphate solution at pH 7, or distilled H₂O, to concentrations of 25-50 μM). Circular dichroism (CD) spectra are obtained on a spectropolarimeter using standard measurement parameters (e.g. temperature, 20° C.; wavelength, 190-260 nm; step resolution, 0.5 nm; speed, 20 nm/sec; accumulations, 10; response, 1 sec; bandwidth, 1 nm; path length, 0.1 cm). The α-helical content of each peptide is calculated by dividing the mean residue ellipticity (e.g. [Φ]222obs) by the reported value for a model helical decapeptide.

b. Assay to Determine Melting Temperature (Tₘ)

[0613] A peptidomimetic macrocycle comprising a secondary structure such as an α-helix exhibits, for example, a higher melting temperature than a corresponding uncrosslinked polypeptide. Peptidomimetic macrocycles exhibit Tₘ of >60° C. representing a highly stable structure in aqueous solutions. To assay the effect of macrocycle formation on melting temperature, peptidomimetic macrocycles or unmodified peptides are dissolved in distilled H₂O (e.g. at a final concentration of 50 μM) and the Tₘ is determined by measuring the change in ellipticity over a temperature range (e.g. 4 to 95° C.) on a spectropolarimeter using standard parameters (e.g. wavelength 222 nm; step resolution, 0.5 nm; speed, 20 nm/sec; accumulations, 10; response, 1 sec; bandwidth, 1 nm; temperature increase rate: 1° C./min; path length, 0.1 cm).

c. Protease Resistance Assay

[0614] The amide bond of the peptide backbone is susceptible to hydrolysis by proteases, thereby rendering peptidic compounds vulnerable to rapid degradation in vivo. Peptide helix formation, however, buries the amide backbone and therefore can shield it from proteolytic cleavage. The peptidomimetic macrocycles can be subjected to in vitro trypsin proteolysis to assess for any change in degradation rate compared to a corresponding uncrosslinked polypeptide. For example, the peptidomimetic macrocycle and a corresponding uncrosslinked polypeptide are incubated with trypsin agarose and the reactions quenched at various time points by centrifugation and subsequent HPLC injection to quantitate the residual substrate by ultraviolet absorption at 280 nm. Briefly, the peptidomimetic macrocycle and peptidomimetic precursor (5 mcg) are incubated with trypsin agarose (S/E ˜125) for 0, 10, 20, 90, and 180 minutes. Reactions are quenched by tabletop centrifugation at high speed; remaining substrate in the isolated supernatant is quantified by HPLC-based peak detection at 280 nm. The proteolytic reaction displays first order kinetics and the rate constant, k, is determined from a plot of ln [S] versus time (k=−1×slope).

d. Ex Vivo Stability Assay

[0615] Peptidomimetic macrocycles with optimized linkers possess, for example, an ex vivo half-life that is at least two-fold greater than that of a corresponding uncrosslinked polypeptide, and possess an ex vivo half-life of 12 hours or more. For ex vivo serum stability studies, a variety of assays can be used. For example, a peptidomimetic macrocycle and a corresponding uncrosslinked polypeptide (2 mcg) are incubated with fresh mouse, rat and/or human serum (2 mL) at 37° C. for 0, 1, 2, 4, 8, and 24 hours. To determine the level of intact compound, the following procedure can be used: The samples are extracted by transferring 100 μL of sera to 2 ml centrifuge tubes followed by the addition of 10 μL of 50% formic acid and 500 μL acetonitrile and centrifugation at 14,000 RPM for 10 min at 4±2° C. The supernatants are then transferred to fresh 2 ml tubes and evaporated on Turbovap under N₂<10 psi, 37° C. The samples are reconstituted in 100 μL of 50:50 acetonitrile:water and submitted to LC-MS/MS analysis.

e. In Vitro Binding Assays

[0616] To assess the binding and affinity of peptidomimetic macrocycles and peptidomimetic precursors to acceptor proteins, a fluorescence polarization assay (FPA) is used, for example. The FPA technique measures the molecular orientation and mobility using polarized light and fluorescent tracer. When excited with polarized light, fluorescent tracers (e.g., FITC) attached to molecules with high apparent molecular weights (e.g. FITC-labeled peptides bound to a large protein) emit higher levels of polarized fluorescence due to their slower rates of rotation as compared to fluorescent tracers attached to smaller molecules (e.g. FITC-labeled peptides that are free in solution).

[0617] For example, fluoresceinated peptidomimetic macrocycles (25 nM) are incubated with the acceptor protein (25-1000 nM) in binding buffer (140 mM NaCl, 50 mM Tris-HCL, pH 7.4) for 30 minutes at room temperature. Binding activity is measured, for example, by fluorescence polarization on a luminescence spectrophotometer. Kd values can be determined by nonlinear regression analysis using, for example, GraphPad Prism software. A peptidomimetic macrocycle shows, In some embodiments, similar or lower Kd than a corresponding uncrosslinked polypeptide.

f. In Vitro Displacement Assays to Characterize Antagonists of Peptide-Protein Interactions

[0618] To assess the binding and affinity of compounds that antagonize the interaction between a peptide and an acceptor protein, a fluorescence polarization assay (FPA) utilizing a fluoresceinated peptidomimetic macrocycle derived from a peptidomimetic precursor sequence is used, for example. The FPA technique measures the molecular orientation and mobility using polarized light and fluorescent tracer. When excited with polarized light, fluorescent tracers (e.g., FITC) attached to molecules with high apparent molecular weights (e.g. FITC-labeled peptides bound to a large protein) emit higher levels of polarized fluorescence due to their slower rates of rotation as compared to fluorescent tracers attached to smaller molecules (e.g. FITC-labeled peptides that are free in solution). A compound that antagonizes the interaction between the fluoresceinated peptidomimetic macrocycle and an acceptor protein will be detected in a competitive binding FPA experiment.

[0619] For example, putative antagonist compounds (1 nM to 1 mM) and a fluoresceinated peptidomimetic macrocycle (25 nM) are incubated with the acceptor protein (50 nM) in binding buffer (140 mM NaCl, 50 mM Tris-HCL, pH 7.4) for 30 minutes at room temperature. Antagonist binding activity is measured, for example, by fluorescence polarization on a luminescence spectrophotometer. Kd values can be determined by nonlinear regression analysis. Any class of molecule, such as small organic molecules, peptides, oligonucleotides or proteins can be examined as putative antagonists in this assay.

g. Assay for Protein-Ligand Binding by Affinity Selection-Mass Spectrometry

[0620] To assess the binding and affinity of test compounds for proteins, an affinity-selection mass spectrometry assay is used, for example. Protein-ligand binding experiments are conducted according to the following representative procedure outlined for a system-wide control experiment using 1 μM peptidomimetic macrocycle plus 5 μM hMDM2. A 1 μL DMSO aliquot of a 40 μM stock solution of peptidomimetic macrocycle is dissolved in 19 μL of PBS (50 mM, pH 7.5 Phosphate buffer containing 150 mM NaCl). The resulting solution is mixed by repeated pipetting and clarified by centrifugation at 10 000 g for 10 min. To a 4 μL aliquot of the resulting supernatant is added 4 μL of 10 μM hMDM2 in PBS. Each 8.0 μL experimental sample thus contains 40 pmol (1.5 μg) of protein at 5.0 μM concentration in PBS plus 1 μM peptidomimetic macrocycle and 2.5% DMSO. Duplicate samples thus prepared for each concentration point are incubated for 60 min at room temperature, and then chilled to 4° C. prior to size-exclusion chromatography-LC-MS analysis of 5.0 μL injections. Samples containing a target protein, protein-ligand complexes, and unbound compounds are injected onto an SEC column, where the complexes are separated from non-binding component by a rapid SEC step. The SEC column eluate is monitored using UV detectors to confirm that the early-eluting protein fraction, which elutes in the void volume of the SEC column, is well resolved from unbound components that are retained on the column. After the peak containing the protein and protein-ligand complexes elutes from the primary UV detector, it enters a sample loop where it is excised from the flow stream of the SEC stage and transferred directly to the LC-MS via a valving mechanism. The (M+3H)³⁺ ion of the peptidomimetic macrocycle is observed by ESI-MS at the expected m/z, confirming the detection of the protein-ligand complex.

h. Assay for Protein-Ligand K_{d} Titration Experiments

[0621] To assess the binding and affinity of test compounds for proteins, a protein-ligand Kd titration experiment is performed, for example. Protein-ligand K_{d} titrations experiments are conducted as follows: 2 μL DMSO aliquots of a serially diluted stock solution of titrant peptidomimetic macrocycle (5, 2.5, . . . , 0.098 mM) are prepared then dissolved in 38 μL of PBS. The resulting solutions are mixed by repeated pipetting and clarified by centrifugation at 10 000 g for 10 min. To 4.0 μL aliquots of the resulting supernatants is added 4.0 μL of 10 μM hMDM2 in PBS. Each 8.0 μL experimental sample thus contains 40 pmol (1.5 μg) of protein at 5.0 μM concentration in PBS, varying concentrations (125, 62.5, . . . , 0.24 μM) of the titrant peptide, and 2.5% DMSO. Duplicate samples thus prepared for each concentration point are incubated at room temperature for 30 min, then chilled to 4° C. prior to SEC-LC-MS analysis of 2.0 μL injections. The (M+H)¹⁺, (M+2H)²⁺, (M+3H)³⁺, and/or (M+Na)¹⁺ ion is observed by ESI-MS; extracted ion chromatograms are quantified, then fit to equations to derive the binding affinity K_{d}.

i. Assay for Competitive Binding Experiments by Affinity Selection-Mass Spectrometry

[0622] To determine the ability of test compounds to bind competitively to proteins, an affinity selection mass spectrometry assay is performed, for example. A mixture of ligands at 40 μM per component is prepared by combining 2 μL aliquots of 400 μM stocks of each of the three compounds with 14 μL of DMSO. Then, 1 μL aliquots of this 40 μM per component mixture are combined with 1 μL DMSO aliquots of a serially diluted stock solution of titrant peptidomimetic macrocycle (10, 5, 2.5, . . . , 0.078 mM). These 2 μL samples are dissolved in 38 μL of PBS. The resulting solutions were mixed by repeated pipetting and clarified by centrifugation at 10 000 g for 10 min. To 4.0 μL aliquots of the resulting supernatants is added 4.0 μL of 10 μM hMDM2 protein in PBS. Each 8.0 μL experimental sample thus contains 40 pmol (1.5 μg) of protein at 5.0 μM concentration in PBS plus 0.5 μM ligand, 2.5% DMSO, and varying concentrations (125, 62.5, . . . , 0.98 μM) of the titrant peptidomimetic macrocycle. Duplicate samples thus prepared for each concentration point are incubated at room temperature for 60 min, then chilled to 4° C. prior to SEC-LC-MS analysis of 2.0 μL injections.

j. Binding Assays in Intact Cells

[0623] It is possible to measure binding of peptides or peptidomimetic macrocycles to their natural acceptors in intact cells by immunoprecipitation experiments. For example, intact cells are incubated with fluoresceinated (FITC-labeled) compounds for 4 hrs in the absence of serum, followed by serum replacement and further incubation that ranges from 4-18 hrs. Cells are then pelleted and incubated in lysis buffer (50 mM Tris [pH 7.6], 150 mM NaCl, 1% CHAPS and protease inhibitor cocktail) for 10 minutes at 4° C. Extracts are centrifuged at 14,000 rpm for 15 minutes and supernatants collected and incubated with 10 μL goat anti-FITC antibody for 2 hrs, rotating at 4° C. followed by further 2 hrs incubation at 4° C. with protein A/G Sepharose (50 μL of 50% bead slurry). After quick centrifugation, the pellets are washed in lysis buffer containing increasing salt concentration (e.g., 150, 300, 500 mM). The beads are then re-equilibrated at 150 mM NaCl before addition of SDS-containing sample buffer and boiling. After centrifugation, the supernatants are optionally electrophoresed using 4%-12% gradient Bis-Tris gels followed by transfer into Immobilon-P membranes. After blocking, blots are optionally incubated with an antibody that detects FITC and also with one or more antibodies that detect proteins that bind to the peptidomimetic macrocycle.

k. Cellular Penetrability Assays

[0624] A peptidomimetic macrocycle is, for example, more cell penetrable compared to a corresponding uncrosslinked macrocycle. Peptidomimetic macrocycles with optimized linkers possess, for example, cell penetrability that is at least two-fold greater than a corresponding uncrosslinked macrocycle, and often 20% or more of the applied peptidomimetic macrocycle will be observed to have penetrated the cell after 4 hours. To measure the cell penetrability of peptidomimetic macrocycles and corresponding uncrosslinked macrocycle, intact cells are incubated with fluorescently-labeled (e.g. fluoresceinated) peptidomimetic macrocycles or corresponding uncrosslinked macrocycle (10 μM) for 4 hrs in serum free media at 37° C., washed twice with media and incubated with trypsin (0.25%) for 10 min at 37° C. The cells are washed again and resuspended in PBS. Cellular fluorescence is analyzed.

l. Cellular Efficacy Assays

[0625] The efficacy of certain peptidomimetic macrocycles is determined, for example, in cell-based killing assays using a variety of tumorigenic and non-tumorigenic cell lines and primary cells derived from human or mouse cell populations. Cell viability is monitored, for example, over 24-96 hrs of incubation with peptidomimetic macrocycles (0.5 to 50 μM) to identify those that kill at EC₅₀<10 μM. Several standard assays that measure cell viability are commercially available and are optionally used to assess the efficacy of the peptidomimetic macrocycles. In addition, assays that measure Annexin V and caspase activation are optionally used to assess whether the peptidomimetic macrocycles kill cells by activating the apoptotic machinery. For example, the Cell Titer-glo assay is used which determines cell viability as a function of intracellular ATP concentration.

m. In Vivo Stability Assay

[0626] To investigate the in vivo stability of the peptidomimetic macrocycles, the compounds are, for example, administered to mice and/or rats by IV, IP, PO or inhalation routes at concentrations ranging from 0.1 to 50 mg/kg and blood specimens withdrawn at 0′, 5′, 15′, 30′, 1 hr, 4 hrs, 8 hrs and 24 hours post-injection. Levels of intact compound in 25 μL of fresh serum are then measured by LC-MS/MS as above.

n. In Vivo Efficacy in Animal Models

[0627] To determine the anti-oncogenic activity of peptidomimetic macrocycles in vivo, the compounds are, for example, given alone (IP, IV, PO, by inhalation or nasal routes) or in combination with sub-optimal doses of relevant chemotherapy (e.g., cyclophosphamide, doxorubicin, etoposide). In one example, 5×10⁶ RS4;11 cells (established from the bone marrow of a patient with acute lymphoblastic leukemia) that stably express luciferase are injected by tail vein in NOD-SCID mice 3 hrs after they have been subjected to total body irradiation. If left untreated, this form of leukemia is fatal in 3 weeks in this model. The leukemia is readily monitored, for example, by injecting the mice with D-luciferin (60 mg/kg) and imaging the anesthetized animals. Total body bioluminescence is quantified by integration of photonic flux (photons/sec) by Living Image Software. Peptidomimetic macrocycles alone or in combination with sub-optimal doses of relevant chemotherapeutics agents are, for example, administered to leukemic mice (10 days after injection/day 1 of experiment, in bioluminescence range of 14-16) by tail vein or IP routes at doses ranging from 0.1 mg/kg to 50 mg/kg for 7 to 21 days. Optionally, the mice are imaged throughout the experiment every other day and survival monitored daily for the duration of the experiment. Expired mice are optionally subjected to necropsy at the end of the experiment. Another animal model is implantation into NOD-SCID mice of DoHH2, a cell line derived from human follicular lymphoma that stably expresses luciferase. These in vivo tests optionally generate preliminary pharmacokinetic, pharmacodynamic and toxicology data.

o. Clinical Trials

[0628] To determine the suitability of the peptidomimetic macrocycles for treatment of humans, clinical trials are performed. For example, patients diagnosed with cancer and in need of treatment can be selected and separated in treatment and one or more control groups, wherein the treatment group is administered a peptidomimetic macrocycle, while the control groups receive a placebo or a known anti-cancer drug. The treatment safety and efficacy of the peptidomimetic macrocycles can thus be evaluated by performing comparisons of the patient groups with respect to factors such as survival and quality-of-life. In this example, the patient group treated with a peptidomimetic macrocycle can show improved long-term survival compared to a patient control group treated with a placebo.

### EXAMPLES

### Example 1: Synthesis of 6-chlorotryptophan Fmoc Amino Acids

[chemical structure]

### Tert-butyl 6-chloro-3-formyl-1H-indole-1-carboxylate, 1

[0630] To a stirred solution of dry DMF (12 mL) was added dropwise POCl₃ (3.92 mL, 43 mmol, 1.3 equiv) at 0° C. under argon. The solution was stirred at 0° C. for 20 min before a solution of 6-chloroindole (5.0 g, 33 mmol, 1 eq.) in dry DMF (30 mL) was added dropwise. The resulting mixture was warmed to room temperature and stirred for an additional 2.5 h. Water (50 mL) was added to the reaction mixture, and the solution was neutralized with 4M aqueous NaOH (pH ˜8). The resulting solid was filtered off, washed with water, and dried under vacuum. This material was used in the next step without additional purification.

[0631] To a stirred solution of the crude formyl indole (33 mmol, 1 eq.) in THF (150 mL) was added successively Boc₂O (7.91 g, 36.3 mmol, 1.1 equiv) and DMAP (0.4 g, 3.3 mmol, 0.1 equiv) at room temperature under N₂. The resulting mixture was stirred at room temperature for 1.5 h, and the solvent was evaporated under reduced pressure. The residue was taken up in EtOAc and washed with 1N HCl, dried, and concentrated to afford formyl indole 1 (9 g, 98% over 2 steps) as a white solid. ¹H NMR (CDCl₃) δ: 1.70 (s, Boc, 9H); 7.35 (dd, 1H); 8.21 (m, 3H); 10.07 (s, 1H).

### Tert-butyl 6-chloro-3-(hydroxymethyl)-1H-indole-1-carboxylate, 2

[0632] To a solution of compound 1 (8.86 g, 32 mmol, 1 eq.) in ethanol (150 mL) was added NaBH₄ (2.4 g, 63 mmol, 2 eq.). The reaction was stirred for 3 h at room temperature. The reaction mixture was concentrated, and the residue was poured into diethyl ether and water. The organic layer was separated, dried over magnesium sulfate, and concentrated to give a white solid (8.7 g, 98%). This material was directly used in the next step without additional purification. ¹H NMR (CDCl₃) δ: 1.65 (s, Boc, 9H); 4.80 (s, 2H, CH₂); 7.21 (dd, 1H); 7.53 (m, 2H); 8.16 (bs, 1H).

### Tert-butyl 3-(bromomethyl)-6-chloro-1H-indole-1-carboxylate, 3

[0633] To a solution of compound 2 (4.1 g, 14.6 mmol, 1 eq.) in dichloromethane (50 mL) under argon was added a solution of triphenylphosphine (4.59 g, 17.5 mmol, 1.2 eq.) in dichloromethane (50 mL) at −40° C. The reaction was stirred for 30 min at 40° C. NBS (3.38 g, 19 mmol, 1.3 eq.) was then added to the reaction mixture. The resulting mixture was warmed to room temperature and stirred overnight. Dichloromethane was evaporated, carbon tetrachloride (100 mL) was added, and the mixture was stirred for 1 h and filtrated. The filtrate was concentrated, loaded on a silica plug, and quickly eluted with 25% EtOAc in hexanes. The solution was concentrated to afford a white foam (3.84 g, 77%). ¹H NMR (CDCl₃) δ: 1.66 (s, Boc, 9H); 4.63 (s, 2H, CH₂); 7.28 (dd, 1H); 7.57 (d, 1H); 7.64 (bs, 1H); 8.18 (bs, 1H).

### αMe-6Cl-Trp(Boc)-Ni—S-BPB, 4

[0634] To S-Ala-Ni—S-BPB (2.66 g, 5.2 mmol, 1 eq.) and KO-tBu (0.87 g, 7.8 mmol, 1.5 eq.) was added 50 mL of DMF under argon. The bromide derivative compound 3 (2.68 g, 7.8 mmol, 1.5 eq.) was dissolved in DMF (5.0 mL) and added to the reaction mixture using a syringe. The reaction mixture was stirred at ambient temperature for 1 h. The solution was then quenched with 5% aqueous acetic acid and diluted with water. The desired product was extracted in dichloromethane, dried, and concentrated. The oily product 4 was purified by flash chromatography (solid loading) on normal phase using EtOAc and hexanes as eluents to give a red solid (1.78 g, 45% yield). M+H calc. 775.21, M+H obs. 775.26; ¹H NMR (CDCl₃) δ: 1.23 (s, 3H, cMe); 1.56 (m, 11H, Boc+CH₂); 1.82-2.20 (m, 4H, 2CH₂); 3.03 (m, 1H, CH_{α}); 3.24 (m, 2H, CH₂); 3.57 and 4.29 (AB system, 2H, CH₂ (benzyl), J=12.8 Hz); 6.62 (d, 2H); 6.98 (d, 1H); 7.14 (m, 2H); 7.23 (m, 1H); 7.32-7.36 (m, 5H); 7.50 (m, 2H); 7.67 (bs, 1H); 7.98 (d, 2H); 8.27 (m, 2H).

### 6Cl-Trp(Boc)-Ni—S-BPB, 5

[0635] To Gly-Ni—S-BPB (4.6 g, 9.2 mmol, 1 eq.) and KO-tBu (1.14 g, 10.1 mmol, 1.1 eq.) was added 95 mL of DMF under argon. The bromide derivative compound 3 (3.5 g, 4.6 mmol, 1.1 eq.) was dissolved in DMF (10 mL) and added to the reaction mixture using a syringe. The reaction mixture was stirred at ambient temperature for 1 h. The solution was then quenched with 5% aqueous acetic acid and diluted with water. The desired product was extracted in dichloromethane, dried and concentrated. The oily product 5 was purified by flash chromatography (solid loading) on normal phase using EtOAc and hexanes as eluents to give a red solid (5 g, 71% yield). M+H calc. 761.20, M+H obs. 761.34; ¹H NMR (CDCl₃) δ: 1.58 (m, 11H, Boc+CH₂); 1.84 (m, 1H); 1.96 (m, 1H); 2.24 (m, 2H, CH₂); 3.00 (m, 1H, CH_{α}); 3.22 (m, 2H, CH₂); 3.45 and 4.25 (AB system, 2H, CH₂ (benzyl), J=12.8 Hz); 4.27 (m, 1H, CH_{α}); 6.65 (d, 2H); 6.88 (d, 1H); 7.07 (m, 2H); 7.14 (m, 2H); 7.28 (m, 3H); 7.35-7.39 (m, 2H); 7.52 (m, 2H); 7.96 (d, 2H); 8.28 (m, 2H).

### Fmoc-αMe-6Cl-Trp(Boc)-OH, 6

[0636] To a solution of 3N HCl/MeOH (1/3, 15 mL) at 50° C. was added a solution of compound 4 (1.75 g, 2.3 mmol, 1 eq.) in MeOH (5 ml) dropwise. The starting material disappeared within 3-4 h. The acidic solution was then cooled to 0° C. with an ice bath and quenched with an aqueous solution of Na₂CO₃ (1.21 g, 11.5 mmol, 5 eq.). Methanol was removed and 8 eq. of Na₂CO₃ (1.95 g, 18.4 mmol) were added to the suspension. EDTA disodium salt dihydrate (1.68 g, 4.5 mmol, 2 eq.) was then added, and the resulting suspension was stirred for 2 h. A solution of Fmoc-OSu (0.84 g, 2.5 mmol, 1.1 eq.) in acetone (50 mL) was added, and the reaction was stirred overnight. The reaction was diluted with diethyl ether and 1N HCl. The organic layer was then dried over magnesium sulfate and concentrated in vacuo. The desired product 6 was purified on normal phase using acetone and dichloromethane as eluents to give a white foam (0.9 g, 70% yield). M+H calc. 575.19, M+H obs. 575.37; ¹H NMR (CDCl₃) 1.59 (s, 9H, Boc); 1.68 (s, 3H, Me); 3.48 (bs, 2H, CH₂); 4.22 (m, 1H, CH); 4.39 (bs, 2H, CH₂); 5.47 (s, 1H, NH); 7.10 (m, 1H); 7.18 (m, 2H); 7.27 (m, 2H); 7.39 (m, 2H); 7.50 (m, 2H); 7.75 (d, 2H); 8.12 (bs, 1H).

### Fmoc-6Cl-Trp(Boc)-OH, 7

[0637] To a solution of 3N HCl/MeOH (1/3, 44 mL) at 50° C. was added a solution of compound 5 (5 g, 6.6 mmol, 1 eq.) in MeOH (10 ml) dropwise. The starting material disappeared within 3-4 h. The acidic solution was then cooled to 0° C. with an ice bath and quenched with an aqueous solution of Na₂CO₃ (3.48 g, 33 mmol, 5 eq.). Methanol was removed and 8 eq. of Na₂CO₃ (5.57 g, 52 mmol) were added to the suspension. EDTA disodium salt dihydrate (4.89 g, 13.1 mmol, 2 eq.) was added to the suspension, and the resulting suspension was stirred for 2 h. A solution of Fmoc-OSu (2.21 g, 6.55 mmol, 1.1 eq.) in acetone (100 mL) was added, and the reaction was stirred overnight. The reaction was diluted with diethyl ether and 1N HCl. The organic layer was then dried over magnesium sulfate and concentrated in vacuo. The desired product 7 was purified on normal phase using acetone and dichloromethane as eluents to give a white foam (2.6 g, 69% yield). M+H calc. 561.17, M+H obs. 561.37; ¹H NMR (CDCl₃) 1.63 (s, 9H, Boc); 3.26 (m, 2H, CH₂); 4.19 (m, 1H, CH); 4.39 (m, 2H, CH₂); 4.76 (m, 1H); 5.35 (d, 1H, NH); 7.18 (m, 2H); 7.28 (m, 2H); 7.39 (m, 3H); 7.50 (m, 2H); 7.75 (d, 2H); 8.14 (bs, 1H).

### Example 2: Peptidomimetic Macrocycles

[0638] Peptidomimetic macrocycles were designed by replacing two or more naturally-occurring amino acids with the corresponding synthetic amino acids. Substitutions were made at i and i+4, and i and i+7 positions. Peptide synthesis was performed manually or using an automated peptide synthesizer under solid phase conditions using rink amide AM resin and Fmoc main-chain protecting group chemistry. For the coupling of natural Fmoc-protected amino acids, 10 eq. of amino acid and a 1:1:2 molar ratio of coupling reagents HBTU/HOBt/DIEA were employed. Non-natural amino acids (4 eq.) were coupled with a 1:1:2 molar ratio of HATU/HOBt/DIEA. The N-termini of the synthetic peptides were acetylated, and the C-termini were amidated.

[0639] Purification of crosslinked compounds was achieved by HPLC on a reverse phase C18 column to yield the pure compounds. The chemical compositions of the pure products were confirmed by LC/MS mass spectrometry and amino acid analysis.

[0640] Synthesis of Dialkyne-Crosslinked Peptidomimetic Macrocycles, Including SP662, SP663 and SP664.

[0641] Fully protected resin-bound peptides were synthesized on a PEG-PS resin (loading 0.45 mmol/g) on a 0.2 mmol scale. Deprotection of the temporary Fmoc group was achieved by 3×10 min treatments of the resin bound peptide with 20% (v/v) piperidine in DMF. After washing with NMP (3×), dichloromethane (3×) and NMP (3×), coupling of each successive amino acid was achieved with 1×60 min incubation with the appropriate pre-activated Fmoc-amino acid derivative. All protected amino acids (0.4 mmol) were dissolved in NMP and activated with HCTU (0.4 mmol) and DIEA (0.8 mmol) prior to transfer of the coupling solution to the de-protected resin-bound peptide. After coupling was completed, the resin was washed in preparation for the next deprotection/coupling cycle.

[0642] Acetylation of the amino terminus was carried out in the presence of acetic anhydride/DIEA in NMP. The LC-MS analysis of a cleaved and de-protected sample obtained from an aliquot of the fully assembled resin-bound peptide was accomplished in order to verifying the completion of each coupling. In a typical example, tetrahydrofuran (4 ml) and triethylamine (2 ml) were added to the peptide resin (0.2 mmol) in a 40 ml glass vial and shaken for 10 minutes. Pd(PPh₃)₂Cl₂ (0.014 g, 0.02 mmol) and copper iodide (0.008 g, 0.04 mmol) were then added and the resulting reaction mixture was mechanically shaken 16 hours while open to atmosphere. The diyne-cyclized resin-bound peptides were de-protected and cleaved from the solid support by treatment with TFA/H₂O/TIS (95/5/5 v/v) for 2.5 h at room temperature. After filtration of the resin the TFA solution was precipitated in cold diethyl ether and centrifuged to yield the desired product as a solid. The crude product was purified by preparative HPLC.

[0643] Synthesis of Single Alkyne-Crosslinked Peptidomimetic Macrocycles, Including SP665.

[0644] Fully protected resin-bound peptides were synthesized on a Rink amide MBHA resin (loading 0.62 mmol/g) on a 0.1 mmol scale. Deprotection of the temporary Fmoc group was achieved by 2×20 min treatments of the resin bound peptide with 25% (v/v) piperidine in NMP. After extensive flow washing with NMP and dichloromethane, coupling of each successive amino acid was achieved with 1×60 min incubation with the appropriate pre-activated Fmoc-amino acid derivative. All protected amino acids (1 mmol) were dissolved in NMP and activated with HCTU (1 mmol) and DIEA (1 mmol) prior to transfer of the coupling solution to the de-protected resin-bound peptide. After coupling was completed, the resin was extensively flow washed in preparation for the next deprotection/coupling cycle.

[0645] Acetylation of the amino terminus was carried out in the presence of acetic anhydride/DIEA in NMP/NMM. The LC-MS analysis of a cleaved and de-protected sample obtained from an aliquot of the fully assembled resin-bound peptide was accomplished to verify the completion of each coupling reaction. In a typical example, the peptide resin (0.1 mmol) was washed with DCM. Resin was loaded into a microwave vial. The vessel was evacuated and purged with nitrogen. Molybdenum hexacarbonyl (0.01 eq.) was added. Anhydrous chlorobenzene was added to the reaction vessel. Then 2-fluorophenol (1 eq.) was added. The reaction was then loaded into the microwave and held at 130° C. for 10 minutes. The reaction pushed for a longer period time when needed to complete the reaction. The alkyne-metathesized resin-bound peptides were de-protected and cleaved from the solid support by treating the solid support with TFA/H₂O/TIS (94/3/3 v/v) for 3 h at room temperature. After filtration of the resin, the TFA solution was precipitated in cold diethyl ether and centrifuged to yield the desired product as a solid. The crude product was purified by preparative HPLC.

TABLE 1
TABLE 1 shows a list of peptidomimetic macrocycles prepared.

| | | SEQ | | | | Calc | Calc | Calc |
|---|---|---|---|---|---|---|---|---|
| | | ID | Iso- | Exact | Found | (M + | (M + | (M + |
| SP | Sequence | NO: | mer | Mass | Mass | 1)/1 | 2)/2 | 3)/3 |
| 1 | Ac-F$r8AYWEAc3cL$AAA-NH₂ | 10 | | 1456.78 | 729.44 | 1457.79 | 729.4 | 486.6 |
| 2 | Ac-F$r8AYWEAc3cL$AAibA-NH₂ | 11 | | 1470.79 | 736.4 | 1471.8 | 736.4 | 491.27 |
| 3 | Ac-LTF$r8AYWAQL$SANle-NH₂ | 12 | | 1715.97 | 859.02 | 1716.98 | 858.99 | 573 |
| 4 | Ac-LTF$r8AYWAQL$SAL-NH₂ | 13 | | 1715.97 | 859.02 | 1716.98 | 858.99 | 573 |
| 5 | Ac-LTF$r8AYWAQL$SAM-NH₂ | 14 | | 1733.92 | 868.48 | 1734.93 | 867.97 | 578.98 |
| 6 | Ac-LTF$r8AYWAQL$SAhL-NH₂ | 15 | | 1729.98 | 865.98 | 1730.99 | 866 | 577.67 |
| 7 | Ac-LTF$r8AYWAQL$SAF-NH₂ | 16 | | 1749.95 | 876.36 | 1750.96 | 875.98 | 584.32 |
| 8 | Ac-LTF$r8AYWAQL$SAI-NH₂ | 17 | | 1715.97 | 859.02 | 1716.98 | 858.99 | 573 |
| 9 | Ac-LTF$r8AYWAQL$SAChg-NH₂ | 18 | | 1741.98 | 871.98 | 1742.99 | 872 | 581.67 |
| 10 | Ac-LTF$r8AYWAQL$SAAib-NH₂ | 19 | | 1687.93 | 845.36 | 1688.94 | 844.97 | 563.65 |
| 11 | Ac-LTF$r8AYWAQL$SAA-NH₂ | 20 | | 1673.92 | 838.01 | 1674.93 | 837.97 | 558.98 |
| 12 | Ac-LTF$r8AYWA$L$S$Nle-NH₂ | 21 | | 1767.04 | 884.77 | 1768.05 | 884.53 | 590.02 |
| 13 | Ac-LTF$r8AYWA$L$S$A-NH₂ | 22 | | 1724.99 | 864.23 | 1726 | 863.5 | 576 |
| 14 | Ac-F$r8AYWEAc3cL$AANle-NH₂ | 23 | | 1498.82 | 750.46 | 1499.83 | 750.42 | 500.61 |
| 15 | Ac-F$r8AYWEAc3cL$AAL-NH₂ | 24 | | 1498.82 | 750.46 | 1499.83 | 750.42 | 500.61 |
| 16 | Ac-F$r8AYWEAc3cL$AAM-NH₂ | 25 | | 1516.78 | 759.41 | 1517.79 | 759.4 | 506.6 |
| 17 | Ac-F$r8AYWEAc3cL$AAhL-NH₂ | 26 | | 1512.84 | 757.49 | 1513.85 | 757.43 | 505.29 |
| 18 | Ac-F$r8AYWEAc3cL$AAF-NH₂ | 27 | | 1532.81 | 767.48 | 1533.82 | 767.41 | 511.94 |
| 19 | Ac-F$r8AYWEAc3cL$AAI-NH₂ | 28 | | 1498.82 | 750.39 | 1499.83 | 750.42 | 500.61 |
| 20 | Ac-F$r8AYWEAc3cL$AAChg-NH₂ | 29 | | 1524.84 | 763.48 | 1525.85 | 763.43 | 509.29 |
| 21 | Ac-F$r8AYWEAc3cL$AACha-NH₂ | 30 | | 1538.85 | 770.44 | 1539.86 | 770.43 | 513.96 |
| 22 | Ac-F$r8AYWEAc3cL$AAAib-NH₂ | 31 | | 1470.79 | 736.84 | 1471.8 | 736.4 | 491.27 |
| 23 | Ac-LTF$r8AYWAQL$AAAibV-NH₂ | 32 | | 1771.01 | 885.81 | 1772.02 | 886.51 | 591.34 |
| 24 | Ac-LTF$r8AYWAQL$AAAibV-NH₂ | 33 | iso2 | 1771.01 | 886.26 | 1772.02 | 886.51 | 591.34 |
| 25 | Ac-LTF$r8AYWAQL$SAibAA-NH₂ | 34 | | 1758.97 | 879.89 | 1759.98 | 880.49 | 587.33 |
| 26 | Ac-LTF$r8AYWAQL$SAibAA-NH₂ | 35 | iso2 | 1758.97 | 880.34 | 1759.98 | 880.49 | 587.33 |
| 27 | Ac-HLTF$r8HHWHQL$AANleNle-NH₂ | 36 | | 2056.15 | 1028.86 | 2057.16 | 1029.08 | 686.39 |
| 28 | Ac-DLTF$r8HHWHQL$RRLV-NH₂ | 37 | | 2190.23 | 731.15 | 2191.24 | 1096.12 | 731.08 |
| 29 | Ac-HHTF$r8HHWHQL$AAML-NH₂ | 38 | | 2098.08 | 700.43 | 2099.09 | 1050.05 | 700.37 |
| 30 | Ac-F$r8HHWHQL$RRDCha-NH₂ | 39 | | 1917.06 | 959.96 | 1918.07 | 959.54 | 640.03 |
| 31 | Ac-F$r8HHWHQL$HRFV-NH₂ | 40 | | 1876.02 | 938.65 | 1877.03 | 939.02 | 626.35 |
| 32 | Ac-HLTF$r8HHWHQL$AAhLA-NH₂ | 41 | | 2028.12 | 677.2 | 2029.13 | 1015.07 | 677.05 |
| 33 | Ac-DLTF$r8HHWHQL$RRChgl-NH₂ | 42 | | 2230.26 | 1115.89 | 2231.27 | 1116.14 | 744.43 |
| 34 | Ac-DLTF$r8HHWHQL$RRChgl-NH₂ | 43 | iso2 | 2230.26 | 1115.96 | 2231.27 | 1116.14 | 744.43 |
| 35 | Ac-HHTF$r8HHWHQL$AAChav-NH₂ | 44 | | 2106.14 | 1053.95 | 2107.15 | 1054.08 | 703.05 |
| 36 | Ac-F$r8HHWHQL$RRDa-NH₂ | 45 | | 1834.99 | 918.3 | 1836 | 918.5 | 612.67 |
| 37 | Ac-F$r8HHWHQL$HRAibG-NH₂ | 46 | | 1771.95 | 886.77 | 1772.96 | 886.98 | 591.66 |
| 38 | Ac-F$r8AYWAQL$HHNleL-NH₂ | 47 | | 1730.97 | 866.57 | 1731.98 | 866.49 | 578 |
| 39 | Ac-F$r8AYWSAL$HQANle-NH₂ | 48 | | 1638.89 | 820.54 | 1639.9 | 820.45 | 547.3 |
| 40 | Ac-F$r8AYWVQL$QHChgl-NH₂ | 49 | | 1776.01 | 889.44 | 1777.02 | 889.01 | 593.01 |
| 41 | Ac-F$r8AYWTAL$QQNlev-NH₂ | 50 | | 1671.94 | 836.97 | 1672.95 | 836.98 | 558.32 |
| 42 | Ac-F$r8AYWYQL$HAibAa-NH₂ | 51 | | 1686.89 | 844.52 | 1687.9 | 844.45 | 563.3 |
| 43 | Ac-LTF$r8AYWAQL$HHLa-NH₂ | 52 | | 1903.05 | 952.27 | 1904.06 | 952.53 | 635.36 |
| 44 | Ac-LTF$r8AYWAQL$HHLa-NH₂ | 53 | iso2 | 1903.05 | 952.27 | 1904.06 | 952.53 | 635.36 |
| 45 | Ac-LTF$r8AYWAQL$HQNlev-NH₂ | 54 | | 1922.08 | 962.48 | 1923.09 | 962.05 | 641.7 |
| 46 | Ac-LTF$r8AYwAQL$HQNlev-NH₂ | 55 | iso2 | 1922.08 | 962.4 | 1923.09 | 962.05 | 641.7 |
| 47 | Ac-LTF$r8AYWAQL$QQM1-NH₂ | 56 | | 1945.05 | 973.95 | 1946.06 | 973.53 | 649.36 |
| 48 | Ac-LTF$r8AYWAQL$QQM1-NH₂ | 57 | iso2 | 1945.05 | 973.88 | 1946.06 | 973.53 | 649.36 |
| 49 | Ac-LTF$r8AYWAQL$HAibhLV-NH₂ | 58 | | 1893.09 | 948.31 | 1894.1 | 947.55 | 632.04 |
| 50 | Ac-LTF$r8AYWAQL$AHFA-NH₂ | 59 | | 1871.01 | 937.4 | 1872.02 | 936.51 | 624.68 |
| 51 | Ac-HLTF$r8HHWHQL$AANlel-NH₂ | 60 | | 2056.15 | 1028.79 | 2057.16 | 1029.08 | 686.39 |
| 52 | Ac-DLTF$r8HHWHQL$RRLa-NH₂ | 61 | | 2162.2 | 721.82 | 2163.21 | 1082.11 | 721.74 |
| 53 | Ac-HHTF$r8HHWHQL$AAMv-NH₂ | 62 | | 2084.07 | 1042.92 | 2085.08 | 1043.04 | 695.7 |
| 54 | Ac-F$r8HHWHQL$RRDA-NH₂ | 63 | | 1834.99 | 612.74 | 1836 | 918.5 | 612.67 |
| 55 | Ac-F$r8HHWHQL$HRFCha-NH₂ | 64 | | 1930.06 | 966.47 | 1931.07 | 966.04 | 644.36 |
| 56 | Ac-F$r8AYWEAL$AA-NHAm | 65 | | 1443.82 | 1445.71 | 1444.83 | 722.92 | 482.28 |
| 57 | Ac-F$r8AYWEAL$AA-NHiAm | 66 | | 1443.82 | 723.13 | 1444.83 | 722.92 | 482.28 |
| 58 | Ac-F$r8AYWEAL$AA-NHnPr3Ph | 67 | | 1491.82 | 747.3 | 1492.83 | 746.92 | 498.28 |
| 59 | Ac-F$r8AYWEAL$AA-NHnBu33Me | 68 | | 1457.83 | 1458.94 | 1458.84 | 729.92 | 486.95 |
| 60 | Ac-F$r8AYWEAL$AA-NHnPr | 69 | | 1415.79 | 709.28 | 1416.8 | 708.9 | 472.94 |
| 61 | Ac-F$r8AYWEAL$AA-NHnEt2Ch | 70 | | 1483.85 | 1485.77 | 1484.86 | 742.93 | 495.62 |
| 62 | Ac-F$r8AYWEAL$AA-NHnEt2Cp | 71 | | 1469.83 | 1470.78 | 1470.84 | 735.92 | 490.95 |
| 63 | Ac-F$r8AYWEAL$AA-NHHex | 72 | | 1457.83 | 730.19 | 1458.84 | 729.92 | 486.95 |
| 64 | Ac-LTF$r8AYWAQL$AAIA-NH₂ | 73 | | 1771.01 | 885.81 | 1772.02 | 886.51 | 591.34 |
| 65 | Ac-LTF$r8AYWAQL$AAIA-NH₂ | 74 | iso2 | 1771.01 | 866.8 | 1772.02 | 886.51 | 591.34 |
| 66 | Ac-LTF$r8AYWAAL$AAMA-NH₂ | 75 | | 1731.94 | 867.08 | 1732.95 | 866.98 | 578.32 |
| 67 | Ac-LTF$r8AYWAAL$AAMA-NH₂ | 76 | iso2 | 1731.94 | 867.28 | 1732.95 | 866.98 | 578.32 |
| 68 | Ac-LTF$r8AYwAQL$AANleA-NH₂ | 77 | | 1771.01 | 867.1 | 1772.02 | 886.51 | 591.34 |
| 69 | Ac-LTF$r8AYWAQL$AANleA-NH₂ | 78 | iso2 | 1771.01 | 886.89 | 1772.02 | 886.51 | 591.34 |
| 70 | Ac-LTF$r8AYWAQL$AAIa-NH₂ | 79 | | 1771.01 | 886.8 | 1772.02 | 886.51 | 591.34 |
| 71 | Ac-LTF$r8AYWAQL$AAIa-NH₂ | 80 | iso2 | 1771.01 | 887.09 | 1772.02 | 886.51 | 591.34 |
| 72 | Ac-LTF$r8AYWAAL$AAMa-NH₂ | 81 | | 1731.94 | 867.17 | 1732.95 | 866.98 | 578.32 |
| 73 | Ac-LTF$r8AYWAAL$AAMa-NH₂ | 82 | iso2 | 1731.94 | 867.37 | 1732.95 | 866.98 | 578.32 |
| 74 | Ac-LTF$r8AYWAQL$AANlea-NH₂ | 83 | | 1771.01 | 887.08 | 1772.02 | 886.51 | 591.34 |
| 75 | Ac-LTF$r8AYWAQL$AANlea-NH₂ | 84 | iso2 | 1771.01 | 887.08 | 1772.02 | 886.51 | 591.34 |
| 76 | Ac-LTF$r8AYWAAL$AAIv-NH₂ | 85 | | 1742.02 | 872.37 | 1743.03 | 872.02 | 581.68 |
| 77 | Ac-LTF$r8AYWAAL$AAIv-NH₂ | 86 | iso2 | 1742.02 | 872.74 | 1743.03 | 872.02 | 581.68 |
| 78 | Ac-LTF$r8AYWAQL$AAMv-NH₂ | 87 | | 1817 | 910.02 | 1818.01 | 909.51 | 606.67 |
| 79 | Ac-LTF$r8AYWAAL$AANlev-NH₂ | 88 | | 1742.02 | 872.37 | 1743.03 | 872.02 | 581.68 |
| 80 | Ac-LTF$r8AYWAAL$AANlev-NH₂ | 89 | iso2 | 1742.02 | 872.28 | 1743.03 | 872.02 | 581.68 |
| 81 | Ac-LTF$r8AYWAQL$AAI1-NH₂ | 90 | | 1813.05 | 907.81 | 1814.06 | 907.53 | 605.36 |
| 82 | Ac-LTF$r8AYWAQL$AAIl-NH₂ | 91 | iso2 | 1813.05 | 907.81 | 1814.06 | 907.53 | 605.36 |
| 83 | Ac-LTF$r8AYWAAL$AAMl-NH₂ | 92 | | 1773.99 | 887.37 | 1775 | 888 | 592.34 |
| 84 | Ac-LTF$r8AYWAQL$AANlel-NH₂ | 93 | | 1813.05 | 907.61 | 1814.06 | 907.53 | 605.36 |
| 85 | Ac-LTF$r8AYWAQL$AANlel-NH₂ | 94 | iso2 | 1813.05 | 907.71 | 1814.06 | 907.53 | 605.36 |
| 86 | Ac-F$r8AYWEAL$AAMA-NH₂ | 95 | | 1575.82 | 789.02 | 1576.83 | 788.92 | 526.28 |
| 87 | Ac-F$r8AYWEAL$AANleA-NH₂ | 96 | | 1557.86 | 780.14 | 1558.87 | 779.94 | 520.29 |
| 88 | Ac-F$r8AYWEAL$AAIa-NH₂ | 97 | | 1557.86 | 780.33 | 1558.87 | 779.94 | 520.29 |
| 89 | Ac-F$r8AYWEAL$AAMa-NH₂ | 98 | | 1575.82 | 789.3 | 1576.83 | 788.92 | 526.28 |
| 90 | Ac-F$r8AYWEAL$AANlea-NH₂ | 99 | | 1557.86 | 779.4 | 1558.87 | 779.94 | 520.29 |
| 91 | Ac-F$r8AYWEAL$AAIv-NH₂ | 100 | | 1585.89 | 794.29 | 1586.9 | 793.95 | 529.64 |
| 92 | Ac-F$r8AYwEAL$AAmv-NH₂ | 101 | | 1603.85 | 803.08 | 1604.86 | 802.93 | 535.62 |
| 93 | Ac-F$r8AYWEAL$AANlev-NH₂ | 102 | | 1585.89 | 793.46 | 1586.9 | 793.95 | 529.64 |
| 94 | Ac-F$r8AYWEAL$AAIl-NH₂ | 103 | | 1599.91 | 800.49 | 1600.92 | 800.96 | 534.31 |
| 95 | Ac-F$r8AYWEAL$AAMl-NH₂ | 104 | | 1617.86 | 809.44 | 1618.87 | 809.94 | 540.29 |
| 96 | Ac-F$r8AYWEAL$AANlel-NH₂ | 105 | | 1599.91 | 801.7 | 1600.92 | 800.96 | 534.31 |
| 97 | Ac-F$r8AYWEAL$AANlel-NH₂ | 106 | iso2 | 1599.91 | 801.42 | 1600.92 | 800.96 | 534.31 |
| 98 | Ac-LTF$r8AY6clWAQLSAA-NH₂ | 107 | | 1707.88 | 855.72 | 1708.89 | 854.95 | 570.3 |
| 99 | Ac-LTF$r8AY6clWAQLSAA-NH₂ | 108 | iso2 | 1707.88 | 855.35 | 1708.89 | 854.95 | 570.3 |
| 100 | Ac-WTF$r8FYWSQL$AVAa-NH₂ | 109 | | 1922.01 | 962.21 | 1923.02 | 962.01 | 641.68 |
| 101 | Ac-WTF$r8FYWSQL$AVAa-NH₂ | 110 | iso2 | 1922.01 | 962.49 | 1923.02 | 962.01 | 641.68 |
| 102 | Ac-WTF$r8VYWSQL$AVA-NH₂ | 111 | | 1802.98 | 902.72 | 1803.99 | 902.5 | 602 |
| 103 | Ac-WTF$r8VYWSQL$AVA-NH₂ | 112 | iso2 | 1802.98 | 903 | 1803.99 | 902.5 | 602 |
| 104 | Ac-WTF$r8FYWSQL$SAAa-NH₂ | 113 | | 1909.98 | 956.47 | 1910.99 | 956 | 637.67 |
| 105 | Ac-WTF$r8FYwSQL$SAAa-NH₂ | 114 | iso2 | 1909.98 | 956.47 | 1910.99 | 956 | 637.67 |
| 106 | Ac-WTF$r8VYWSQL$AVAaa-NH₂ | 115 | | 1945.05 | 974.15 | 1946.06 | 973.53 | 649.36 |
| 107 | Ac-WTF$r8VYWSQL$AVAaa-NH₂ | 116 | iso2 | 1945.05 | 973.78 | 1946.06 | 973.53 | 649.36 |
| 108 | Ac-LTF$r8AYWAQL$AVG-NH₂ | 117 | | 1671.94 | 837.52 | 1672.95 | 836.98 | 558.32 |
| 109 | Ac-LTF$r8AYWAQL$AVG-NH₂ | 118 | iso2 | 1671.94 | 837.21 | 1672.95 | 836.98 | 558.32 |
| 110 | Ac-LTF$r8AYWAQL$AVQ-NH₂ | 119 | | 1742.98 | 872.74 | 1743.99 | 872.5 | 582 |
| 111 | Ac-LTF$r8AYWAQL$AVQ-NH₂ | 120 | iso2 | 1742.98 | 872.74 | 1743.99 | 872.5 | 582 |
| 112 | Ac-LTF$r8AYWAQL$SAa-NH₂ | 121 | | 1673.92 | 838.23 | 1674.93 | 837.97 | 558.98 |
| 113 | Ac-LTF$r8AYWAQL$SAa-NH₂ | 122 | iso2 | 1673.92 | 838.32 | 1674.93 | 837.97 | 558.98 |
| 114 | Ac-LTF$r8AYWAQhL$SAA-NH₂ | 123 | | 1687.93 | 844.37 | 1688.94 | 844.97 | 563.65 |
| 115 | Ac-LTF$r8AYWAQhL$SAA-NH₂ | 124 | iso2 | 1687.93 | 844.81 | 1688.94 | 844.97 | 563.65 |
| 116 | Ac-LTF$r8AYWEQLStSA$-NH₂ | 125 | | 1826 | 905.27 | 1827.01 | 914.01 | 609.67 |
| 117 | Ac-LTF$r8AYWAQL$SLA-NH₂ | 126 | | 1715.97 | 858.48 | 1716.98 | 858.99 | 573 |
| 118 | Ac-LTF$r8AYWAQL$SLA-NH₂ | 127 | iso2 | 1715.97 | 858.87 | 1716.98 | 858.99 | 573 |
| 119 | Ac-LTF$r8AYWAQL$SWA-NH₂ | 128 | | 1788.96 | 895.21 | 1789.97 | 895.49 | 597.33 |
| 120 | Ac-LTF$r8AYWAQL$SWA-NH₂ | 129 | iso2 | 1788.96 | 895.28 | 1789.97 | 895.49 | 597.33 |
| 121 | Ac-LTF$r8AYWAQL$SVS-NH₂ | 130 | | 1717.94 | 859.84 | 1718.95 | 859.98 | 573.65 |
| 122 | Ac-LTF$r8AYWAQL$SAS-NH₂ | 131 | | 1689.91 | 845.85 | 1690.92 | 845.96 | 564.31 |
| 123 | Ac-LTF$r8AYWAQL$SVG-NH₂ | 132 | | 1687.93 | 844.81 | 1688.94 | 844.97 | 563.65 |
| 124 | Ac-ETF$r8VYWAQL$SAa-NH₂ | 133 | | 1717.91 | 859.76 | 1718.92 | 859.96 | 573.64 |
| 125 | Ac-ETF$r8VYWAQL$SAA-NH₂ | 134 | | 1717.91 | 859.84 | 1718.92 | 859.96 | 573.64 |
| 126 | Ac-ETF$r8VYWAQL$SVA-NH₂ | 135 | | 1745.94 | 873.82 | 1746.95 | 873.98 | 582.99 |
| 127 | Ac-ETF$r8VYWAQL$SLA-NH₂ | 136 | | 1759.96 | 880.85 | 1760.97 | 880.99 | 587.66 |
| 128 | Ac-ETF$r8VYWAQL$SWA-NH₂ | 137 | | 1832.95 | 917.34 | 1833.96 | 917.48 | 611.99 |
| 129 | Ac-ETF$r8KYWAQL$SWA-NH₂ | 138 | | 1861.98 | 931.92 | 1862.99 | 932 | 621.67 |
| 130 | Ac-ETF$r8VYWAQL$SVS-NH₂ | 139 | | 1761.93 | 881.89 | 1762.94 | 881.97 | 588.32 |
| 131 | Ac-ETF$r8VYWAQL$SAS-NH₂ | 140 | | 1733.9 | 867.83 | 1734.91 | 867.96 | 578.97 |
| 132 | Ac-ETF$r8VYWAQL$SVG-NH₂ | 141 | | 1731.92 | 866.87 | 1732.93 | 866.97 | 578.31 |
| 133 | Ac-LTF$r8VYWAQL$SSa-NH₂ | 142 | | 1717.94 | 859.47 | 1718.95 | 859.98 | 573.65 |
| 134 | Ac-ETF$r8VYWAQL$SSa-NH₂ | 143 | | 1733.9 | 867.83 | 1734.91 | 867.96 | 578.97 |
| 135 | Ac-LTF$r8VYWAQL$SNa-NH₂ | 144 | | 1744.96 | 873.38 | 1745.97 | 873.49 | 582.66 |
| 136 | Ac-ETF$r8VYWAQL$SNa-NH₂ | 145 | | 1760.91 | 881.3 | 1761.92 | 881.46 | 587.98 |
| 137 | Ac-LTF$r8VYWAQL$SAa-NH₂ | 146 | | 1701.95 | 851.84 | 1702.96 | 851.98 | 568.32 |
| 138 | Ac-LTF$r8VYWAQL$SVA-NH₂ | 147 | | 1729.98 | 865.53 | 1730.99 | 866 | 577.67 |
| 139 | Ac-LTF$r8VYWAQL$SVA-NH₂ | 148 | iso2 | 1729.98 | 865.9 | 1730.99 | 866 | 577.67 |
| 140 | Ac-LTF$r8VYWAQL$SWA-NH₂ | 149 | | 1816.99 | 909.42 | 1818 | 909.5 | 606.67 |
| 141 | Ac-LTF$r8VYWAQL$SVS-NH₂ | 150 | | 1745.98 | 873.9 | 1746.99 | 874 | 583 |
| 142 | Ac-LTF$r8VYWAQL$SVS-NH₂ | 151 | iso2 | 1745.98 | 873.9 | 1746.99 | 874 | 583 |
| 143 | Ac-LTF$r8VYWAQL$SAS-NH₂ | 152 | | 1717.94 | 859.84 | 1718.95 | 859.98 | 573.65 |
| 144 | Ac-LTF$r8VYWAQL$SAS-NH₂ | 153 | iso2 | 1717.94 | 859.91 | 1718.95 | 859.98 | 573.65 |
| 145 | Ac-LTF$r8VYWAQL$SVG-NH₂ | 154 | | 1715.97 | 858.87 | 1716.98 | 858.99 | 573 |
| 146 | Ac-LTF$r8VYWAQL$SVG-NH₂ | 155 | iso2 | 1715.97 | 858.87 | 1716.98 | 858.99 | 573 |
| 147 | Ac-LTF$r8EYWAQCha$SAA-NH₂ | 156 | | 1771.96 | 886.85 | 1772.97 | 886.99 | 591.66 |
| 148 | Ac-LTF$r8EYWAQCha$SAA-NH₂ | 157 | iso2 | 1771.96 | 886.85 | 1772.97 | 886.99 | 591.66 |
| 149 | Ac-LTF$r8EYWAQCpg$SAA-NH₂ | 158 | | 1743.92 | 872.86 | 1744.93 | 872.97 | 582.31 |
| 150 | Ac-LTF$r8EYWAQCpg$SAA-NH₂ | 159 | iso2 | 1743.92 | 872.86 | 1744.93 | 872.97 | 582.31 |
| 151 | Ac-LTF$r8EYWAQF$SAA-NH₂ | 160 | | 1765.91 | 883.44 | 1766.92 | 883.96 | 589.64 |
| 152 | Ac-LTF$r8EYWAQF$SAA-NH₂ | 161 | iso2 | 1765.91 | 883.89 | 1766.92 | 883.96 | 589.64 |
| 153 | Ac-LTF$r8EYWAQCba$SAA-NH₂ | 162 | | 1743.92 | 872.42 | 1744.93 | 872.97 | 582.31 |
| 154 | Ac-LTF$r8EYWAQCba$SAA-NH₂ | 163 | iso2 | 1743.92 | 873.39 | 1744.93 | 872.97 | 582.31 |
| 155 | Ac-LTF3Cl$r8EYWAQL$SAA-NH₂ | 164 | | 1765.89 | 883.89 | 1766.9 | 883.95 | 589.64 |
| 156 | Ac-LTF3Cl$r8EYWAQL$SAA-NH₂ | 165 | iso2 | 1765.89 | 883.96 | 1766.9 | 883.95 | 589.64 |
| 157 | Ac-LTF34F2$r8EYWAQL$SAA-NH₂ | 166 | | 1767.91 | 884.48 | 1768.92 | 884.96 | 590.31 |
| 158 | Ac-LTF34F2$r8EYWAQL$SAA-NH₂ | 167 | iso2 | 1767.91 | 884.48 | 1768.92 | 884.96 | 590.31 |
| 159 | Ac-LTF34F2$r8EYWAQhL$SAA-NH₂ | 168 | | 1781.92 | 891.44 | 1782.93 | 891.97 | 594.98 |
| 160 | Ac-LTF34F2$r8EYWAQhL$SAA-NH₂ | 169 | iso2 | 1781.92 | 891.88 | 1782.93 | 891.97 | 594.98 |
| 161 | Ac-ETF$r8EYWAQL$SAA-NH₂ | 170 | | 1747.88 | 874.34 | 1748.89 | 874.95 | 583.63 |
| 162 | Ac-LTF$r8AYWVQL$SAA-NH₂ | 171 | | 1701.95 | 851.4 | 1702.96 | 851.98 | 568.32 |
| 163 | Ac-LTF$r8AHWAQL$SAA-NH₂ | 172 | | 1647.91 | 824.83 | 1648.92 | 824.96 | 550.31 |
| 164 | Ac-LTF$r8AEWAQL$SAA-NH₂ | 173 | | 1639.9 | 820.39 | 1640.91 | 820.96 | 547.64 |
| 165 | Ac-LTF$r8ASWAQL$SAA-NH₂ | 174 | | 1597.89 | 799.38 | 1598.9 | 799.95 | 533.64 |
| 166 | Ac-LTF$r8AEWAQL$SAA-NH₂ | 175 | iso2 | 1639.9 | 820.39 | 1640.91 | 820.96 | 547.64 |
| 167 | Ac-LTF$r8ASWAQL$SAA-NH₂ | 176 | iso2 | 1597.89 | 800.31 | 1598.9 | 799.95 | 533.64 |
| 168 | Ac-LTF$r8AF4coohWAQL$SAA-NH₂ | 177 | | 1701.91 | 851.4 | 1702.92 | 851.96 | 568.31 |
| 169 | Ac-LTF$r8AF4coohWAQL$SAA-NH₂ | 178 | iso2 | 1701.91 | 851.4 | 1702.92 | 851.96 | 568.31 |
| 170 | Ac-LTF$r8AHWAQL$AAIa-NH₂ | 179 | | 1745 | 874.13 | 1746.01 | 873.51 | 582.67 |
| 171 | Ac-ITF$r8FYWAQL$AAIa-NH₂ | 180 | | 1847.04 | 923.92 | 1848.05 | 924.53 | 616.69 |
| 172 | Ac-ITF$r8EHWAQL$AAIa-NH₂ | 181 | | 1803.01 | 903.17 | 1804.02 | 902.51 | 602.01 |
| 173 | Ac-ITF$r8EHWAQL$AAIa-NH₂ | 182 | iso2 | 1803.01 | 903.17 | 1804.02 | 902.51 | 602.01 |
| 174 | Ac-ETF$r8EHWAQL$AAIa-NH₂ | 183 | | 1818.97 | 910.76 | 1819.98 | 910.49 | 607.33 |
| 175 | Ac-ETF$r8EHWAQL$AAIa-NH₂ | 184 | iso2 | 1818.97 | 910.85 | 1819.98 | 910.49 | 607.33 |
| 176 | Ac-LTF$r8AHWVQL$AAIa-NH₂ | 185 | | 1773.03 | 888.09 | 1774.04 | 887.52 | 592.02 |
| 177 | Ac-ITF$r8FYWVQL$AAIa-NH₂ | 186 | | 1875.07 | 939.16 | 1876.08 | 938.54 | 626.03 |
| 178 | Ac-ITF$r8EYWVQL$AAIa-NH₂ | 187 | | 1857.04 | 929.83 | 1858.05 | 929.53 | 620.02 |
| 179 | Ac-ITF$r8EHWVQL$AAIa-NH₂ | 188 | | 1831.04 | 916.86 | 1832.05 | 916.53 | 611.35 |
| 180 | Ac-LTF$r8AEWAQL$AAIa-NH₂ | 189 | | 1736.99 | 869.87 | 1738 | 869.5 | 580 |
| 181 | Ac-LTF$r8AF4coohWAQL$AAIa-NH₂ | 190 | | 1799 | 900.17 | 1800.01 | 900.51 | 600.67 |
| 182 | Ac-LTF$r8AF4coohWAQL$AAIa-NH₂ | 191 | iso2 | 1799 | 900.24 | 1800.01 | 900.51 | 600.67 |
| 183 | Ac-LTF$r8AHWAQL$AHFA-NH₂ | 192 | | 1845.01 | 923.89 | 1846.02 | 923.51 | 616.01 |
| 184 | Ac-ITF$r8FYWAQL$AHFA-NH₂ | 193 | | 1947.05 | 975.05 | 1948.06 | 974.53 | 650.02 |
| 185 | Ac-ITF$r8FYWAQL$AHFA-NH₂ | 194 | iso2 | 1947.05 | 976.07 | 1948.06 | 974.53 | 650.02 |
| 186 | Ac-ITF$r8FHWAQL$AEFA-NH₂ | 195 | | 1913.02 | 958.12 | 1914.03 | 957.52 | 638.68 |
| 187 | Ac-ITF$r8FHWAQL$AEFA-NH₂ | 196 | iso2 | 1913.02 | 957.86 | 1914.03 | 957.52 | 638.68 |
| 188 | Ac-ITF$r8EHWAQL$AHFA-NH₂ | 197 | | 1903.01 | 952.94 | 1904.02 | 952.51 | 635.34 |
| 189 | Ac-ITF$r8EHWAQL$AHFA-NH₂ | 198 | iso2 | 1903.01 | 953.87 | 1904.02 | 952.51 | 635.34 |
| 190 | Ac-LTF$r8AHWVQL$AHFA-NH₂ | 199 | | 1873.04 | 937.86 | 1874.05 | 937.53 | 625.35 |
| 191 | Ac-ITF$r8FYWVQL$AHFA-NH₂ | 200 | | 1975.08 | 988.83 | 1976.09 | 988.55 | 659.37 |
| 192 | Ac-ITF$r8EYWVQL$AHFA-NH₂ | 201 | | 1957.05 | 979.35 | 1958.06 | 979.53 | 653.36 |
| 193 | Ac-ITF$r8EHWVQL$AHFA-NH₂ | 202 | | 1931.05 | 967 | 1932.06 | 966.53 | 644.69 |
| 194 | Ac-ITF$r8EHWVQL$AHFA-NH₂ | 203 | iso2 | 1931.05 | 967.93 | 1932.06 | 966.53 | 644.69 |
| 195 | Ac-ETF$r8EYWAAL$SAA-NH₂ | 204 | | 1690.86 | 845.85 | 1691.87 | 846.44 | 564.63 |
| 196 | Ac-LTF$r8AYWVAL$SAA-NH₂ | 205 | | 1644.93 | 824.08 | 1645.94 | 823.47 | 549.32 |
| 197 | Ac-LTF$r8AHWAAL$SAA-NH₂ | 206 | | 1590.89 | 796.88 | 1591.9 | 796.45 | 531.3 |
| 198 | Ac-LTF$r8AEWAAL$SAA-NH₂ | 207 | | 1582.88 | 791.9 | 1583.89 | 792.45 | 528.63 |
| 199 | Ac-LTF$r8AEWAAL$SAA-NH₂ | 208 | iso2 | 1582.88 | 791.9 | 1583.89 | 792.45 | 528.63 |
| 200 | Ac-LTF$r8ASWAAL$SAA-NH₂ | 209 | | 1540.87 | 770.74 | 1541.88 | 771.44 | 514.63 |
| 201 | Ac-LTF$r8ASWAAL$SAA-NH₂ | 210 | iso2 | 1540.87 | 770.88 | 1541.88 | 771.44 | 514.63 |
| 202 | Ac-LTF$r8AYwAAL$AAIa-NH₂ | 211 | | 1713.99 | 857.39 | 1715 | 858 | 572.34 |
| 203 | Ac-LTF$r8AYWAAL$AAIa-NH₂ | 212 | iso2 | 1713.99 | 857.84 | 1715 | 858 | 572.34 |
| 204 | Ac-LTF$r8AYWAAL$AHFA-NH₂ | 213 | | 1813.99 | 907.86 | 1815 | 908 | 605.67 |
| 205 | Ac-LTF$r8EHWAQL$AHIa-NH₂ | 214 | | 1869.03 | 936.1 | 1870.04 | 935.52 | 624.02 |
| 206 | Ac-LTF$r8EHWAQL$AHIa-NH₂ | 215 | iso2 | 1869.03 | 937.03 | 1870.04 | 935.52 | 624.02 |
| 207 | Ac-LTF$r8AHWAQL$AHIa-NH₂ | 216 | | 1811.03 | 906.87 | 1812.04 | 906.52 | 604.68 |
| 208 | Ac-LTF$r8EYWAQL$AHIa-NH₂ | 217 | | 1895.04 | 949.15 | 1896.05 | 948.53 | 632.69 |
| 209 | Ac-LTF$r8AYWAQL$AAFa-NH₂ | 218 | | 1804.99 | 903.2 | 1806 | 903.5 | 602.67 |
| 210 | Ac-LTF$r8AYWAQL$AAFa-NH₂ | 219 | iso2 | 1804.99 | 903.28 | 1806 | 903.5 | 602.67 |
| 211 | Ac-LTF$r8AYWAQL$AAWa-NH₂ | 220 | | 1844 | 922.81 | 1845.01 | 923.01 | 615.67 |
| 212 | Ac-LTF$r8AYWAQL$AAVa-NH₂ | 221 | | 1756.99 | 878.86 | 1758 | 879.5 | 586.67 |
| 213 | Ac-LTF$r8AYWAQL$AAVa-NH₂ | 222 | iso2 | 1756.99 | 879.3 | 1758 | 879.5 | 586.67 |
| 214 | Ac-LTF$r8AYWAQL$AALa-NH₂ | 223 | | 1771.01 | 886.26 | 1772.02 | 886.51 | 591.34 |
| 215 | Ac-LTF$r8AYWAQL$AALa-NH₂ | 224 | iso2 | 1771.01 | 886.33 | 1772.02 | 886.51 | 591.34 |
| 216 | Ac-LTF$r8EYWAQL$AAIa-NH₂ | 225 | | 1829.01 | 914.89 | 1830.02 | 915.51 | 610.68 |
| 217 | Ac-LTF$r8EYWAQL$AAIa-NH₂ | 226 | iso2 | 1829.01 | 915.34 | 1830.02 | 915.51 | 610.68 |
| 218 | Ac-LTF$r8EYWAQL$AAFa-NH₂ | 227 | | 1863 | 932.87 | 1864.01 | 932.51 | 622.01 |
| 219 | Ac-LTF$r8EYWAQL$AAFa-NH₂ | 228 | iso2 | 1863 | 932.87 | 1864.01 | 932.51 | 622.01 |
| 220 | Ac-LTF$r8EYWAQL$AAVa-NH₂ | 229 | | 1815 | 908.23 | 1816.01 | 908.51 | 606.01 |
| 221 | Ac-LTF$r8EYWAQL$AAVa-NH₂ | 230 | iso2 | 1815 | 908.31 | 1816.01 | 908.51 | 606.01 |
| 222 | Ac-LTF$r8EHWAQL$AAIa-NH₂ | 231 | | 1803.01 | 903.17 | 1804.02 | 902.51 | 602.01 |
| 223 | Ac-LTF$r8EHWAQL$AAIa-NH₂ | 232 | iso2 | 1803.01 | 902.8 | 1804.02 | 902.51 | 602.01 |
| 224 | Ac-LTF$r8EHWAQL$AAWa-NH₂ | 233 | | 1876 | 939.34 | 1877.01 | 939.01 | 626.34 |
| 225 | Ac-LTF$r8EHWAQL$AAWa-NH₂ | 234 | iso2 | 1876 | 939.62 | 1877.01 | 939.01 | 626.34 |
| 226 | Ac-LTF$r8EHWAQL$AALa-NH₂ | 235 | | 1803.01 | 902.8 | 1804.02 | 902.51 | 602.01 |
| 227 | Ac-LTF$r8EHWAQL$AALa-NH₂ | 236 | iso2 | 1803.01 | 902.9 | 1804.02 | 902.51 | 602.01 |
| 228 | Ac-ETF$r8EHWVQL$AALa-NH₂ | 237 | | 1847 | 924.82 | 1848.01 | 924.51 | 616.67 |
| 229 | Ac-LTF$r8AYWAQL$AAAa-NH₂ | 238 | | 1728.96 | 865.89 | 1729.97 | 865.49 | 577.33 |
| 230 | Ac-LTF$r8AYWAQL$AAAa-NH₂ | 239 | iso2 | 1728.96 | 865.89 | 1729.97 | 865.49 | 577.33 |
| 231 | Ac-LTF$r8AYWAQL$AAAibA-NH₂ | 240 | | 1742.98 | 872.83 | 1743.99 | 872.5 | 582 |
| 232 | Ac-LTF$r8AYWAQL$AAAibA-NH₂ | 241 | iso2 | 1742.98 | 872.92 | 1743.99 | 872.5 | 582 |
| 233 | Ac-LTF$r8AYWAQL$AAAAa-NH₂ | 242 | | 1800 | 901.42 | 1801.01 | 901.01 | 601.01 |
| 234 | Ac-LTF$r5AYWAQL$s8AAIa-NH₂ | 243 | | 1771.01 | 887.17 | 1772.02 | 886.51 | 591.34 |
| 235 | Ac-LTF$r5AYWAQL$s8SAA-NH₂ | 244 | | 1673.92 | 838.33 | 1674.93 | 837.97 | 558.98 |
| 236 | Ac-LTF$r8AYWAQCba$AANleA-NH₂ | 245 | | 1783.01 | 892.64 | 1784.02 | 892.51 | 595.34 |
| 237 | Ac-ETF$r8AYWAQCba$AANleA-NH₂ | 246 | | 1798.97 | 900.59 | 1799.98 | 900.49 | 600.66 |
| 238 | Ac-LTF$r8EYWAQCba$AANleA-NH₂ | 247 | | 1841.01 | 922.05 | 1842.02 | 921.51 | 614.68 |
| 239 | Ac-LTF$r8AYWAQCba$AWNleA-NH₂ | 248 | | 1898.05 | 950.46 | 1899.06 | 950.03 | 633.69 |
| 240 | Ac-ETF$r8AYWAQCba$AWNleA-NH₂ | 249 | | 1914.01 | 958.11 | 1915.02 | 958.01 | 639.01 |
| 241 | Ac-LTF$r8EYWAQCba$AWNleA-NH₂ | 250 | | 1956.06 | 950.62 | 1957.07 | 979.04 | 653.03 |
| 242 | Ac-LTF$r8EYWAQCba$SAFA-NH₂ | 251 | | 1890.99 | 946.55 | 1892 | 946.5 | 631.34 |
| 243 | Ac-LTF34F2$r8EYWAQCba$SANleA- | 252 | | 1892.99 | 947.57 | 1894 | 947.5 | 632 |
| | NH₂ | | | | | | | |
| 244 | Ac-LTF$r8EF4coohWAQCba$SANleA- | 253 | | 1885 | 943.59 | 1886.01 | 943.51 | 629.34 |
| | NH₂ | | | | | | | |
| 245 | Ac-LTF$r8EYWSQCba$SANleA-NH₂ | 254 | | 1873 | 937.58 | 1874.01 | 937.51 | 625.34 |
| 246 | Ac-LTF$r8EYWWQCba$SANleA-NH₂ | 255 | | 1972.05 | 987.61 | 1973.06 | 987.03 | 658.36 |
| 247 | Ac-LTF$r8EYWAQCba$AAIa-NH₂ | 256 | | 1841.01 | 922.05 | 1842.02 | 921.51 | 614.68 |
| 248 | Ac-LTF34F2$r8EYWAQCba$AAIa-NH₂ | 257 | | 1876.99 | 939.99 | 1878 | 939.5 | 626.67 |
| 249 | Ac-LTF$r8EF4coohWAQCba$AAIa- | 258 | | 1869.01 | 935.64 | 1870.02 | 935.51 | 624.01 |
| | NH₂ | | | | | | | |
| 250 | Pam-ETF$r8EYWAQCba$SAA-NH₂ | 259 | | 1956.1 | 979.57 | 1957.11 | 979.06 | 653.04 |
| 251 | Ac-LThF$r8EFWAQCba$SAA-NH₂ | 260 | | 1741.94 | 872.11 | 1742.95 | 871.98 | 581.65 |
| 252 | Ac-LTA$r8EYWAQCba$SAA-NH₂ | 261 | | 1667.89 | 835.4 | 1668.9 | 834.95 | 556.97 |
| 253 | Ac-LTF$r8EYAAQCba$SAA-NH₂ | 262 | | 1628.88 | 815.61 | 1629.89 | 815.45 | 543.97 |
| 254 | Ac-LTF$r8EY2NalAQCba$SAA-NH₂ | 263 | | 1754.93 | 879.04 | 1755.94 | 878.47 | 585.98 |
| 255 | Ac-LTF$r8AYWAQCba$SAA-NH₂ | 264 | | 1685.92 | 844.71 | 1686.93 | 843.97 | 562.98 |
| 256 | Ac-LTF$r8EYWAQCba$SAF-NH₂ | 265 | | 1819.96 | 911.41 | 1820.97 | 910.99 | 607.66 |
| 257 | Ac-LTF$r8EYWAQCba$SAFa-NH₂ | 266 | | 1890.99 | 947.41 | 1892 | 946.5 | 631.34 |
| 258 | Ac-LTF$r8AYWAQCba$SAF-NH₂ | 267 | | 1761.95 | 882.73 | 1762.96 | 881.98 | 588.32 |
| 259 | Ac-LTF34F2$r8AYWAQCba$SAF-NH₂ | 268 | | 1797.93 | 900.87 | 1798.94 | 899.97 | 600.32 |
| 260 | Ac-LTF$r8AF4coohWAQCba$SAF-NH₂ | 269 | | 1789.94 | 896.43 | 1790.95 | 895.98 | 597.65 |
| 261 | Ac-LTF$r8EY6clWAQCba$SAF-NH₂ | 270 | | 1853.92 | 929.27 | 1854.93 | 927.97 | 618.98 |
| 262 | Ac-LTF$r8AYWSQCba$SAF-NH₂ | 271 | | 1777.94 | 890.87 | 1778.95 | 889.98 | 593.65 |
| 263 | Ac-LTF$r8AYWWQCba$SAF-NH₂ | 272 | | 1876.99 | 939.91 | 1878 | 939.5 | 626.67 |
| 264 | Ac-LTF$r8AYWAQCba$AAIa-NH₂ | 273 | | 1783.01 | 893.19 | 1784.02 | 892.51 | 595.34 |
| 265 | Ac-LTF34F2$r8AYWAQCba$AAIa-NH₂ | 274 | | 1818.99 | 911.23 | 1820 | 910.5 | 607.34 |
| 266 | Ac-LTF$r8AY6clWAQCba$AAIa-NH₂ | 275 | | 1816.97 | 909.84 | 1817.98 | 909.49 | 606.66 |
| 267 | Ac-LTF$r8AF4coohWAQCba$AAIa- | 276 | | 1811 | 906.88 | 1812.01 | 906.51 | 604.67 |
| | NH₂ | | | | | | | |
| 268 | Ac-LTF$r8EYWAQCba$AAFa-NH₂ | 277 | | 1875 | 938.6 | 1876.01 | 938.51 | 626.01 |
| 269 | Ac-LTF$r8EYWAQCba$AAFa-NH₂ | 278 | iso2 | 1875 | 938.6 | 1876.01 | 938.51 | 626.01 |
| 270 | Ac-ETF$r8AYWAQCba$AWNlea-NH₂ | 279 | | 1914.01 | 958.42 | 1915.02 | 958.01 | 639.01 |
| 271 | Ac-LTF$r8EYWAQCba$AWNlea-NH₂ | 280 | | 1956.06 | 979.42 | 1957.07 | 979.04 | 653.03 |
| 272 | Ac-ETF$r8EYWAQCba$AWNlea-NH₂ | 281 | | 1972.01 | 987.06 | 1973.02 | 987.01 | 658.34 |
| 273 | Ac-ETF$r8EYWAQCba$AWNlea-NH₂ | 282 | iso2 | 1972.01 | 987.06 | 1973.02 | 987.01 | 658.34 |
| 274 | Ac-LTF$r8AYWAQCba$SAFa-NH₂ | 283 | | 1832.99 | 917.89 | 1834 | 917.5 | 612 |
| 275 | Ac-LTF$r8AYWAQCba$SAFa-NH₂ | 284 | iso2 | 1832.99 | 918.07 | 1834 | 917.5 | 612 |
| 276 | Ac-ETF$r8AYWAQL$AWNlea-NH₂ | 285 | | 1902.01 | 952.22 | 1903.02 | 952.01 | 635.01 |
| 277 | Ac-LTF$r8EYWAQL$AWNlea-NH₂ | 286 | | 1944.06 | 973.5 | 1945.07 | 973.04 | 649.03 |
| 278 | Ac-ETF$r8EYWAQL$AWNlea-NH₂ | 287 | | 1960.01 | 981.46 | 1961.02 | 981.01 | 654.34 |
| 279 | Dmaac-LTF$r8EYWAQhL$SAA-NH₂ | 288 | | 1788.98 | 896.06 | 1789.99 | 895.5 | 597.33 |
| 280 | Hexac-LTF$r8EYWAQhL$SAA-NH₂ | 289 | | 1802 | 902.9 | 1803.01 | 902.01 | 601.67 |
| 281 | Napac-LTF$r8EYWAQhL$SAA-NH₂ | 290 | | 1871.99 | 937.58 | 1873 | 937 | 625 |
| 282 | Decac-LTF$r8EYWAQhL$SAA-NH₂ | 291 | | 1858.06 | 930.55 | 1859.07 | 930.04 | 620.36 |
| 283 | Admac-LTF$r8EYWAQhL$SAA-NH₂ | 292 | | 1866.03 | 934.07 | 1867.04 | 934.02 | 623.02 |
| 284 | Tmac-LTF$r8EYWAQhL$SAA-NH₂ | 293 | | 1787.99 | 895.41 | 1789 | 895 | 597 |
| 285 | Pam-LTF$r8EYWAQhL$SAA-NH₂ | 294 | | 1942.16 | 972.08 | 1943.17 | 972.09 | 648.39 |
| 286 | Ac-LTF$r8AYWAQCba$AANleA-NH₂ | 295 | iso2 | 1783.01 | 892.64 | 1784.02 | 892.51 | 595.34 |
| 287 | Ac-LTF34F2$r8EYWAQCba$AAIa-NH₂ | 296 | iso2 | 1876.99 | 939.62 | 1878 | 939.5 | 626.67 |
| 288 | Ac-LTF34F2$r8EYWAQCba$SAA-NH₂ | 297 | | 1779.91 | 892.07 | 1780.92 | 890.96 | 594.31 |
| 289 | Ac-LTF34F2$r8EYWAQCba$SAA-NH₂ | 298 | iso2 | 1779.91 | 891.61 | 1780.92 | 890.96 | 594.31 |
| 290 | Ac-LTF$r8EF4coohWAQCba$SAA-NH₂ | 299 | | 1771.92 | 887.54 | 1772.93 | 886.97 | 591.65 |
| 291 | Ac-LTF$r8EF4coohWAQCba$SAA-NH₂ | 300 | iso2 | 1771.92 | 887.63 | 1772.93 | 886.97 | 591.65 |
| 292 | Ac-LTF$r8EYWSQCba$SAA-NH₂ | 301 | | 1759.92 | 881.9 | 1760.93 | 880.97 | 587.65 |
| 293 | Ac-LTF$r8EYWSQCba$SAA-NH₂ | 302 | iso2 | 1759.92 | 881.9 | 1760.93 | 880.97 | 587.65 |
| 294 | Ac-LTF$r8EYWAQhL$SAA-NH₂ | 303 | | 1745.94 | 875.05 | 1746.95 | 873.98 | 582.99 |
| 295 | Ac-LTF$r8AYWAQhL$SAF-NH₂ | 304 | | 1763.97 | 884.02 | 1764.98 | 882.99 | 589 |
| 296 | Ac-LTF$r8AYWAQhL$SAF-NH₂ | 305 | iso2 | 1763.97 | 883.56 | 1764.98 | 882.99 | 589 |
| 297 | Ac-LTF34F2$r8AYWAQhL$SAA-NH₂ | 306 | | 1723.92 | 863.67 | 1724.93 | 862.97 | 575.65 |
| 298 | Ac-LTF34F2$r8AYWAQhL$SAA-NH₂ | 307 | iso2 | 1723.92 | 864.04 | 1724.93 | 862.97 | 575.65 |
| 299 | Ac-LTF$r8AF4coohWAQhL$SAA-NH₂ | 308 | | 1715.93 | 859.44 | 1716.94 | 858.97 | 572.98 |
| 300 | Ac-LTF$r8AF4coohWAQhL$SAA-NH₂ | 309 | iso2 | 1715.93 | 859.6 | 1716.94 | 858.97 | 572.98 |
| 301 | Ac-LTF$r8AYWSQhL$SAA-NH₂ | 310 | | 1703.93 | 853.96 | 1704.94 | 852.97 | 568.98 |
| 302 | Ac-LTF$r8AYWSQhL$SAA-NH₂ | 311 | iso2 | 1703.93 | 853.59 | 1704.94 | 852.97 | 568.98 |
| 303 | Ac-LTF$r8EYWAQL$AANleA-NH₂ | 312 | | 1829.01 | 915.45 | 1830.02 | 915.51 | 610.68 |
| 304 | Ac-LTF34F2$r8AYWAQL$AANleA-NH₂ | 313 | | 1806.99 | 904.58 | 1808 | 904.5 | 603.34 |
| 305 | Ac-LTF$r8AF4coohWAQL$AANleA- | 314 | | 1799 | 901.6 | 1800.01 | 900.51 | 600.67 |
| | NH₂ | | | | | | | |
| 306 | Ac-LTF$r8AYWSQL$AANleA-NH₂ | 315 | | 1787 | 894.75 | 1788.01 | 894.51 | 596.67 |
| 307 | Ac-LTF34F2$r8AYWAQhL$AANleA- | 316 | | 1821 | 911.79 | 1822.01 | 911.51 | 608.01 |
| | NH₂ | | | | | | | |
| 308 | Ac-LTF34F2$r8AYWAQhL$AANleA- | 317 | iso2 | 1821 | 912.61 | 1822.01 | 911.51 | 608.01 |
| | NH₂ | | | | | | | |
| 309 | Ac-LTF$r8AF4coohWAQhL$AANleA- | 318 | | 1813.02 | 907.95 | 1814.03 | 907.52 | 605.35 |
| | NH₂ | | | | | | | |
| 310 | Ac-LTF$r8AF4coohWAQhL$AANleA- | 319 | iso2 | 1813.02 | 908.54 | 1814.03 | 907.52 | 605.35 |
| | NH₂ | | | | | | | |
| 311 | Ac-LTF$r8AYWSQhL$AANleA-NH₂ | 320 | | 1801.02 | 901.84 | 1802.03 | 901.52 | 601.35 |
| 312 | Ac-LTF$r8AYWSQhL$AANleA-NH₂ | 321 | iso2 | 1801.02 | 902.62 | 1802.03 | 901.52 | 601.35 |
| 313 | Ac-LTF$r8AYWAQhL$AAAAa-NH₂ | 322 | | 1814.01 | 908.63 | 1815.02 | 908.01 | 605.68 |
| 314 | Ac-LTF$r8AYWAQhL$AAAAa-NH₂ | 323 | iso2 | 1814.01 | 908.34 | 1815.02 | 908.01 | 605.68 |
| 315 | Ac-LTF$r8AYWAQL$AAAAAa-NH₂ | 324 | | 1871.04 | 936.94 | 1872.05 | 936.53 | 624.69 |
| 316 | Ac-LTF$r8AYWAQL$AAAAAAa-NH₂ | 325 | iso2 | 1942.07 | 972.5 | 1943.08 | 972.04 | 648.37 |
| 317 | Ac-LTF$r8AYWAQL$AAAAAAa-NH₂ | 326 | iso1 | 1942.07 | 972.5 | 1943.08 | 972.04 | 648.37 |
| 318 | Ac-LTF$r8EYWAQhL$AANleA-NH₂ | 327 | | 1843.03 | 922.54 | 1844.04 | 922.52 | 615.35 |
| 319 | Ac-AATF$r8AYWAQL$AANleA-NH₂ | 328 | | 1800 | 901.39 | 1801.01 | 901.01 | 601.01 |
| 320 | Ac-LTF$r8AYWAQL$AANleAA-NH₂ | 329 | | 1842.04 | 922.45 | 1843.05 | 922.03 | 615.02 |
| 321 | Ac-ALTF$r8AYWAQL$AANleAA-NH₂ | 330 | | 1913.08 | 957.94 | 1914.09 | 957.55 | 638.7 |
| 322 | Ac-LTF$r8AYWAQCba$AANleAA-NH₂ | 331 | | 1854.04 | 928.43 | 1855.05 | 928.03 | 619.02 |
| 323 | Ac-LTF$r8AYWAQhL$AANleAA-NH₂ | 332 | | 1856.06 | 929.4 | 1857.07 | 929.04 | 619.69 |
| 324 | Ac-LTF$r8EYWAQCba$SAAA-NH₂ | 333 | | 1814.96 | 909.37 | 1815.97 | 908.49 | 605.99 |
| 325 | Ac-LTF$r8EYWAQCba$SAAA-NH₂ | 334 | iso2 | 1814.96 | 909.37 | 1815.97 | 908.49 | 605.99 |
| 326 | Ac-LTF$r8EYWAQCba$SAAAA-NH₂ | 335 | | 1886 | 944.61 | 1887.01 | 944.01 | 629.67 |
| 327 | Ac-LTF$r8EYWAQCba$SAAAA-NH₂ | 336 | iso2 | 1886 | 944.61 | 1887.01 | 944.01 | 629.67 |
| 328 | Ac-ALTF$r8EYWAQCba$SAA-NH₂ | 337 | | 1814.96 | 909.09 | 1815.97 | 908.49 | 605.99 |
| 329 | Ac-ALTF$r8EYWAQCba$SAAA-NH₂ | 338 | | 1886 | 944.61 | 1887.01 | 944.01 | 629.67 |
| 330 | Ac-ALTF$r8EYWAQCba$SAA-NH₂ | 339 | iso2 | 1814.96 | 909.09 | 1815.97 | 908.49 | 605.99 |
| 331 | Ac-LTF$r8EYWAQL$AAAAAa-NH₂ | 340 | iso2 | 1929.04 | 966.08 | 1930.05 | 965.53 | 644.02 |
| 332 | Ac-LTF$r8EY6clWAQCba$SAA-NH₂ | 341 | | 1777.89 | 890.78 | 1778.9 | 889.95 | 593.64 |
| 333 | Ac- | 342 | | 1918.96 | 961.27 | 1919.97 | 960.49 | 640.66 |
| | LTF$r8EF4cooh6clWAQCba$SANleA- | | | | | | | |
| | NH₂ | | | | | | | |
| 334 | Ac- | 343 | iso2 | 1918.96 | 961.27 | 1919.97 | 960.49 | 640.66 |
| | LTF$r8EF4cooh6clWAQCba$SANleA- | | | | | | | |
| | NH₂ | | | | | | | |
| 335 | Ac- | 344 | | 1902.97 | 953.03 | 1903.98 | 952.49 | 635.33 |
| | LTF$r8EF4cooh6clWAQCba$AAIa- | | | | | | | |
| | NH₂ | | | | | | | |
| 336 | Ac- | 345 | iso2 | 1902.97 | 953.13 | 1903.98 | 952.49 | 635.33 |
| | LTF$r8EF4cooh6clWAQCba$AAIa- | | | | | | | |
| | NH₂ | | | | | | | |
| 337 | Ac-LTF$r8AY6cLWAQL$AAAAAa-NH₂ | 346 | | 1905 | 954.61 | 1906.01 | 953.51 | 636.01 |
| 338 | Ac-LTF$r8AY6clWAQL$AAAAAa-NH₂ | 347 | iso2 | 1905 | 954.9 | 1906.01 | 953.51 | 636.01 |
| 339 | Ac-F$r8AY6clWEAL$AAAAAAa-NH₂ | 348 | | 1762.89 | 883.01 | 1763.9 | 882.45 | 588.64 |
| 340 | Ac-ETF$r8EYWAQL$AAAAAa-NH₂ | 349 | | 1945 | 974.31 | 1946.01 | 973.51 | 649.34 |
| 341 | Ac-ETF$r8EYWAQL$AAAAAa-NH₂ | 350 | iso2 | 1945 | 974.49 | 1946.01 | 973.51 | 649.34 |
| 342 | Ac-LTF$r8EYWAQL$AAAAAAa-NH₂ | 351 | | 2000.08 | 1001.6 | 2001.09 | 1001.05 | 667.7 |
| 343 | Ac-LTF$r8EYWAQL$AAAAAAa-NH₂ | 352 | iso2 | 2000.08 | 1001.6 | 2001.09 | 1001.05 | 667.7 |
| 344 | Ac-LTF$r8AYWAQL$AANleAAa-NH₂ | 353 | | 1913.08 | 958.58 | 1914.09 | 957.55 | 638.7 |
| 345 | Ac-LTF$r8AYWAQL$AANleAAa-NH₂ | 354 | iso2 | 1913.08 | 958.58 | 1914.09 | 957.55 | 638.7 |
| 346 | Ac-LTF$r8EYWAQCba$AAAAAa-NH₂ | 355 | | 1941.04 | 972.55 | 1942.05 | 971.53 | 648.02 |
| 347 | Ac-LTF$r8EYWAQCba$AAAAAa-NH₂ | 356 | iso2 | 1941.04 | 972.55 | 1942.05 | 971.53 | 648.02 |
| 348 | Ac-LTF$r8EF4coohWAQCba$AAAAAa- | 357 | | 1969.04 | 986.33 | 1970.05 | 985.53 | 657.35 |
| | NH₂ | | | | | | | |
| 349 | Ac-LTF$r8EF4coohWAQCba$AAAAAa- | 358 | iso2 | 1969.04 | 986.06 | 1970.05 | 985.53 | 657.35 |
| | NH₂ | | | | | | | |
| 350 | Ac-LTF$r8EYWSQCba$AAAAAa-NH₂ | 359 | | 1957.04 | 980.04 | 1958.05 | 979.53 | 653.35 |
| 351 | Ac-LTF$r8EYWSQCba$AAAAAa-NH₂ | 360 | iso2 | 1957.04 | 980.04 | 1958.05 | 979.53 | 653.35 |
| 352 | Ac-LTF$r8EYWAQCba$SAAa-NH₂ | 361 | | 1814.96 | 909 | 1815.97 | 908.49 | 605.99 |
| 353 | Ac-LTF$r8EYWAQCba$SAAa-NH₂ | 362 | iso2 | 1814.96 | 909 | 1815.97 | 908.49 | 605.99 |
| 354 | Ac-ALTF$r8EYWAQCba$SAAa-NH₂ | 363 | | 1886 | 944.52 | 1887.01 | 944.01 | 629.67 |
| 355 | Ac-ALTF$r8EYWAQCba$SAAa-NH₂ | 364 | iso2 | 1886 | 944.98 | 1887.01 | 944.01 | 629.67 |
| 356 | Ac-ALTF$r8EYWAQCba$SAAAa-NH₂ | 365 | | 1957.04 | 980.04 | 1958.05 | 979.53 | 653.35 |
| 357 | Ac-ALTF$r8EYWAQCba$SAAAa-NH₂ | 366 | iso2 | 1957.04 | 980.04 | 1958.05 | 979.53 | 653.35 |
| 358 | Ac-AALTF$r8EYWAQCba$SAAAa-NH₂ | 367 | | 2028.07 | 1016.1 | 2029.08 | 1015.04 | 677.03 |
| 359 | Ac-AALTF$r8EYWAQCba$SAAAa-NH₂ | 368 | iso2 | 2028.07 | 1015.57 | 2029.08 | 1015.04 | 677.03 |
| 360 | Ac-RTF$r8EYWAQCba$SAA-NH₂ | 369 | | 1786.94 | 895.03 | 1787.95 | 894.48 | 596.65 |
| 361 | Ac-LRF$r8EYWAQCba$SAA-NH₂ | 370 | | 1798.98 | 901.51 | 1799.99 | 900.5 | 600.67 |
| 362 | Ac-LTF$r8EYWRQCba$SAA-NH₂ | 371 | | 1828.99 | 916.4 | 1830 | 915.5 | 610.67 |
| 363 | Ac-LTF$r8EYWARCba$SAA-NH₂ | 372 | | 1771.97 | 887.63 | 1772.98 | 886.99 | 591.66 |
| 364 | Ac-LTF$r8EYWAQCba$RAA-NH₂ | 373 | | 1812.99 | 908.08 | 1814 | 907.5 | 605.34 |
| 365 | Ac-LTF$r8EYWAQCba$SRA-NH₂ | 374 | | 1828.99 | 916.12 | 1830 | 915.5 | 610.67 |
| 366 | Ac-LTF$r8EYWAQCba$SAR-NH₂ | 375 | | 1828.99 | 916.12 | 1830 | 915.5 | 610.67 |
| 367 | 5-FAM-BaLTF$r8EYWAQCba$SAA-NH₂ | 376 | | 2131 | 1067.09 | 2132.01 | 1066.51 | 711.34 |
| 368 | 5-FAM-BaLTF$r8AYWAQL$AANleA- | 377 | | 2158.08 | 1080.6 | 2159.09 | 1080.05 | 720.37 |
| | NH₂ | | | | | | | |
| 369 | Ac-LAF$r8EYWAQL$AANleA-NH₂ | 378 | | 1799 | 901.05 | 1800.01 | 900.51 | 600.67 |
| 370 | Ac-ATF$r8EYWAQL$AANleA-NH₂ | 379 | | 1786.97 | 895.03 | 1787.98 | 894.49 | 596.66 |
| 371 | Ac-AAF$r8EYWAQL$AANleA-NH₂ | 380 | | 1756.96 | 880.05 | 1757.97 | 879.49 | 586.66 |
| 372 | Ac-AAAF$r8EYWAQL$AANleA-NH₂ | 381 | | 1827.99 | 915.57 | 1829 | 915 | 610.34 |
| 373 | Ac-AAAAF$r8EYWAQL$AANleA-NH₂ | 382 | | 1899.03 | 951.09 | 1900.04 | 950.52 | 634.02 |
| 374 | Ac-AATF$r8EYWAQL$AANleA-NH₂ | 383 | | 1858 | 930.92 | 1859.01 | 930.01 | 620.34 |
| 375 | Ac-AALTF$r8EYWAQL$AANleA-NH₂ | 384 | | 1971.09 | 987.17 | 1972.1 | 986.55 | 658.04 |
| 376 | Ac-AAALTF$r8EYWAQL$AANleA-NH₂ | 385 | | 2042.12 | 1023.15 | 2043.13 | 1022.07 | 681.71 |
| 377 | Ac-LTF$r8EYWAQL$AANleAA-NH₂ | 386 | | 1900.05 | 952.02 | 1901.06 | 951.03 | 634.36 |
| 378 | Ac-ALTF$r8EYWAQL$AANleAA-NH₂ | 387 | | 1971.09 | 987.63 | 1972.1 | 986.55 | 658.04 |
| 379 | Ac-AALTF$r8EYWAQL$AANleAA-NH₂ | 388 | | 2042.12 | 1022.69 | 2043.13 | 1022.07 | 681.71 |
| 380 | Ac-LTF$r8EYWAQCba$AANleAA-NH₂ | 389 | | 1912.05 | 958.03 | 1913.06 | 957.03 | 638.36 |
| 381 | Ac-LTF$r8EYWAQhL$AANleAA-NH₂ | 390 | | 1914.07 | 958.68 | 1915.08 | 958.04 | 639.03 |
| 382 | Ac-ALTF$r8EYWAQhL$AANleAA-NH₂ | 391 | | 1985.1 | 994.1 | 1986.11 | 993.56 | 662.71 |
| 383 | Ac-LTF$r8ANmYWAQL$AANleA-NH₂ | 392 | | 1785.02 | 894.11 | 1786.03 | 893.52 | 596.01 |
| 384 | Ac-LTF$r8ANmYWAQL$AANleA-NH₂ | 393 | iso2 | 1785.02 | 894.11 | 1786.03 | 893.52 | 596.01 |
| 385 | Ac-LTF$r8AYNmWAQL$AANleA-NH₂ | 394 | | 1785.02 | 894.11 | 1786.03 | 893.52 | 596.01 |
| 386 | Ac-LTF$r8AYNmWAQL$AANleA-NH₂ | 395 | iso2 | 1785.02 | 894.11 | 1786.03 | 893.52 | 596.01 |
| 387 | Ac-LTF$r8AYAmwAQL$AANleA-NH₂ | 396 | | 1785.02 | 894.01 | 1786.03 | 893.52 | 596.01 |
| 388 | Ac-LTF$r8AYAmwAQL$AANleA-NH₂ | 397 | iso2 | 1785.02 | 894.01 | 1786.03 | 893.52 | 596.01 |
| 389 | Ac-LTF$r8AYWAibQL$AANleA-NH₂ | 398 | | 1785.02 | 894.01 | 1786.03 | 893.52 | 596.01 |
| 390 | Ac-LTF$r8AYWAibQL$AANleA-NH₂ | 399 | iso2 | 1785.02 | 894.01 | 1786.03 | 893.52 | 596.01 |
| 391 | Ac-LTF$r8AYWAQL$AAibNleA-NH₂ | 400 | | 1785.02 | 894.38 | 1786.03 | 893.52 | 596.01 |
| 392 | Ac-LTF$r8AYWAQL$AAibNleA-NH₂ | 401 | iso2 | 1785.02 | 894.38 | 1786.03 | 893.52 | 596.01 |
| 393 | Ac-LTF$r8AYWAQL$AaNleA-NH₂ | 402 | | 1771.01 | 887.54 | 1772.02 | 886.51 | 591.34 |
| 394 | Ac-LTF$r8AYWAQL$AaNleA-NH₂ | 403 | iso2 | 1771.01 | 887.54 | 1772.02 | 886.51 | 591.34 |
| 395 | Ac-LTF$r8AYWAQL$ASarNleA-NH₂ | 404 | | 1771.01 | 887.35 | 1772.02 | 886.51 | 591.34 |
| 396 | Ac-LTF$r8AYWAQL$ASarNleA-NH₂ | 405 | iso2 | 1771.01 | 887.35 | 1772.02 | 886.51 | 591.34 |
| 397 | Ac-LTF$r8AYWAQL$AANleAib-NH₂ | 406 | | 1785.02 | 894.75 | 1786.03 | 893.52 | 596.01 |
| 398 | Ac-LTF$r8AYWAQL$AANleAib-NH₂ | 407 | iso2 | 1785.02 | 894.75 | 1786.03 | 893.52 | 596.01 |
| 399 | Ac-LTF$r8AYWAQL$AANleNmA-NH₂ | 408 | | 1785.02 | 894.6 | 1786.03 | 893.52 | 596.01 |
| 400 | Ac-LTF$r8AYWAQL$AANleNmA-NH₂ | 409 | iso2 | 1785.02 | 894.6 | 1786.03 | 893.52 | 596.01 |
| 401 | Ac-LTF$r8AYWAQL$AANleSar-NH₂ | 410 | | 1771.01 | 886.98 | 1772.02 | 886.51 | 591.34 |
| 402 | Ac-LTF$r8AYWAQL$AANleSar-NH₂ | 411 | iso2 | 1771.01 | 886.98 | 1772.02 | 886.51 | 591.34 |
| 403 | Ac-LTF$r8AYWAQL$AANleAAib-NH₂ | 412 | | 1856.06 | | 1857.07 | 929.04 | 619.69 |
| 404 | Ac-LTF$r8AYWAQL$AANleAAib-NH₂ | 413 | iso2 | 1856.06 | | 1857.07 | 929.04 | 619.69 |
| 405 | Ac-LTF$r8AYWAQL$AANleANmA-NH₂ | 414 | | 1856.06 | 930.37 | 1857.07 | 929.04 | 619.69 |
| 406 | Ac-LTF$r8AYWAQL$AANleANmA-NH₂ | 415 | iso2 | 1856.06 | 930.37 | 1857.07 | 929.04 | 619.69 |
| 407 | Ac-LTF$r8AYWAQL$AANleAa-NH₂ | 416 | | 1842.04 | 922.69 | 1843.05 | 922.03 | 615.02 |
| 408 | Ac-LTF$r8AYWAQL$AANleAa-NH₂ | 417 | iso2 | 1842.04 | 922.69 | 1843.05 | 922.03 | 615.02 |
| 409 | Ac-LTF$r8AYWAQL$AANleASar-NH₂ | 418 | | 1842.04 | 922.6 | 1843.05 | 922.03 | 615.02 |
| 410 | Ac-LTF$r8AYWAQL$AANleASar-NH₂ | 419 | iso2 | 1842.04 | 922.6 | 1843.05 | 922.03 | 615.02 |
| 411 | Ac-LTF$/r8AYWAQL$/AANleA-NH₂ | 420 | | 1799.04 | 901.14 | 1800.05 | 900.53 | 600.69 |
| 412 | Ac-LTFAibAYWAQLAibAANleA-NH₂ | 421 | | 1648.9 | 826.02 | 1649.91 | 825.46 | 550.64 |
| 413 | Ac-LTF$r8Cou4YWAQL$AANleA-NH₂ | 422 | | 1975.05 | 989.11 | 1976.06 | 988.53 | 659.36 |
| 414 | Ac-LTF$r8Cou4YWAQL$AANleA-NH₂ | 423 | iso2 | 1975.05 | 989.11 | 1976.06 | 988.53 | 659.36 |
| 415 | Ac-LTF$r8AYWCou4QL$AANleA-NH₂ | 424 | | 1975.05 | 989.11 | 1976.06 | 988.53 | 659.36 |
| 416 | Ac-LTF$r8AYWAQL$Cou4ANleA-NH₂ | 425 | | 1975.05 | 989.57 | 1976.06 | 988.53 | 659.36 |
| 417 | Ac-LTF$r8AYWAQL$Cou4ANleA-NH₂ | 426 | iso2 | 1975.05 | 989.57 | 1976.06 | 988.53 | 659.36 |
| 418 | Ac-LTF$r8AYWAQL$ACou4NleA-NH₂ | 427 | | 1975.05 | 989.57 | 1976.06 | 988.53 | 659.36 |
| 419 | Ac-LTF$r8AYWAQL$ACou4NleA-NH₂ | 428 | iso2 | 1975.05 | 989.57 | 1976.06 | 988.53 | 659.36 |
| 420 | Ac-LTF$r8AYWAQL$AANleA-OH | 429 | | 1771.99 | 887.63 | 1773 | 887 | 591.67 |
| 421 | Ac-LTF$r8AYWAQL$AANleA-OH | 430 | iso2 | 1771.99 | 887.63 | 1773 | 887 | 591.67 |
| 422 | Ac-LTF$r8AYWAQL$AANleA-NHnPr | 431 | | 1813.05 | 908.08 | 1814.06 | 907.53 | 605.36 |
| 423 | Ac-LTF$r8AYWAQL$AANleA-NHnPr | 432 | iso2 | 1813.05 | 908.08 | 1814.06 | 907.53 | 605.36 |
| 424 | Ac-LTF$r8AYWAQL$AANleA- | 433 | | 1855.1 | 929.17 | 1856.11 | 928.56 | 619.37 |
| | NHnBu33me | | | | | | | |
| 425 | Ac-LTF$r8AYWAQL$AANleA- | 434 | iso2 | 1855.1 | 929.17 | 1856.11 | 928.56 | 619.37 |
| | NHnBu33Me | | | | | | | |
| 426 | Ac-LTF$r8AYWAQL$AANleA-NHHex | 435 | | 1855.1 | 929.17 | 1856.11 | 928.56 | 619.37 |
| 427 | Ac-LTF$r8AYWAQL$AANleA-NHHex | 436 | iso2 | 1855.1 | 929.17 | 1856.11 | 928.56 | 619.37 |
| 428 | Ac-LTA$r8AYWAQL$AANleA-NH₂ | 437 | | 1694.98 | 849.33 | 1695.99 | 848.5 | 566 |
| 429 | Ac-LThL$r8AYWAQL$AANleA-NH₂ | 438 | | 1751.04 | 877.09 | 1752.05 | 876.53 | 584.69 |
| 430 | Ac-LTF$r8AYAAQL$AANleA-NH₂ | 439 | | 1655.97 | 829.54 | 1656.98 | 828.99 | 553 |
| 431 | Ac-LTF$r8AY2NalAQL$AANleA-NH₂ | 440 | | 1782.01 | 892.63 | 1783.02 | 892.01 | 595.01 |
| 432 | Ac-LTF$r8EYWCou4QCba$SAA-NH₂ | 441 | | 1947.97 | 975.8 | 1948.98 | 974.99 | 650.33 |
| 433 | Ac-LTF$r8EYWCou7QCba$SAA-NH₂ | 442 | | 16.03 | 974.9 | 17.04 | 9.02 | 6.35 |
| 434 | Ac-LTF%r8EYWAQCba%SAA-NH₂ | 443 | | 1745.94 | 874.8 | 1746.95 | 873.98 | 582.99 |
| 435 | Dmaac-LTF$r8EYWAQCba$SAA-NH₂ | 444 | | 1786.97 | 894.8 | 1787.98 | 894.49 | 596.66 |
| 436 | Dmaac-LTF$r8AYWAQL$AAAAAa-NH₂ | 445 | | 1914.08 | 958.2 | 1915.09 | 958.05 | 639.03 |
| 437 | Dmaac-LTF$r8AYWAQL$AAAAAa-NH₂ | 446 | iso2 | 1914.08 | 958.2 | 1915.09 | 958.05 | 639.03 |
| 438 | Dmaac-LTF$r8EYWAQL$AAAAAa-NH₂ | 447 | | 1972.08 | 987.3 | 1973.09 | 987.05 | 658.37 |
| 439 | Dmaac-LTF$r8EYWAQL$AAAAAa-NH₂ | 448 | iso2 | 1972.08 | 987.3 | 1973.09 | 987.05 | 658.37 |
| 440 | Dmaac- | 449 | | 1912.05 | 957.4 | 1913.06 | 957.03 | 638.36 |
| | LTF$r8EF4coohWAQCba$AAIa-NH₂ | | | | | | | |
| 441 | Dmaac- | 450 | iso2 | 1912.05 | 957.4 | 1913.06 | 957.03 | 638.36 |
| | LTF$r8EF4coohWAQCba$AAIa-NH₂ | | | | | | | |
| 442 | Dmaac-LTF$r8AYWAQL$AANleA-NH₂ | 451 | | 1814.05 | 908.3 | 1815.06 | 908.03 | 605.69 |
| 443 | Dmaac-LTF$r8AYWAQL$AANleA-NH₂ | 452 | iso2 | 1814.05 | 908.3 | 1815.06 | 908.03 | 605.69 |
| 444 | Ac-LTF%r8AYWAQL%AANleA-NH₂ | 453 | | 1773.02 | 888.37 | 1774.03 | 887.52 | 592.01 |
| 445 | Ac-LTF%r8EYWAQL%AAAAAa-NH₂ | 454 | | 1931.06 | 966.4 | 1932.07 | 966.54 | 644.69 |
| 446 | Cou6BaLTF$r8EYWAQhL$SAA-NH₂ | 455 | | 2018.05 | 1009.9 | 2019.06 | 1010.03 | 673.69 |
| 447 | Cou8BaLTF$r8EYWAQhL$SAA-NH₂ | 456 | | 1962.96 | 982.34 | 1963.97 | 982.49 | 655.32 |
| 448 | Ac-LTF4I$r8EYWAQL$AAAAAa-NH₂ | 457 | | 2054.93 | 1028.68 | 2055.94 | 1028.47 | 685.98 |
| 449 | Ac-LTF$r8EYWAQL$AAAAAa-NH₂ | 458 | | 1929.04 | 966.17 | 1930.05 | 965.53 | 644.02 |
| 550 | Ac-LTF$r8EYWAQL$AAAAAa-OH | 459 | | 1930.02 | 966.54 | 1931.03 | 966.02 | 644.35 |
| 551 | Ac-LTF$r8EYWAQL$AAAAAa-OH | 460 | iso2 | 1930.02 | 965.89 | 1931.03 | 966.02 | 644.35 |
| 552 | Ac-LTF$r8EYwAEL$AAAAAa-NH₂ | 461 | | 1930.02 | 966.82 | 1931.03 | 966.02 | 644.35 |
| 553 | Ac-LTF$r8EYWAEL$AAAAAa-NH₂ | 462 | iso2 | 1930.02 | 966.91 | 1931.03 | 966.02 | 644.35 |
| 554 | Ac-LTF$r8EYWAEL$AAAAAa-OH | 463 | | 1931.01 | 967.28 | 1932.02 | 966.51 | 644.68 |
| 555 | Ac-LTF$r8EY6clWAQL$AAAAAa-NH₂ | 464 | | 1963 | 983.28 | 1964.01 | 982.51 | 655.34 |
| 556 | Ac-LTF$r8EF4bOH2wAQL$AAAAAa- | 465 | | 1957.05 | 980.04 | 1958.06 | 979.53 | 653.36 |
| | NH₂ | | | | | | | |
| 557 | Ac-AAALTF$r8EYWAQL$AAAAAa-NH₂ | 466 | | 2142.15 | 1072.83 | 2143.16 | 1072.08 | 715.06 |
| 558 | Ac-LTF34F2$r8EYWAQL$AAAAAa-NH₂ | 467 | | 1965.02 | 984.3 | 1966.03 | 983.52 | 656.01 |
| 559 | Ac-RTF$r8EYWAQL$AAAAAa-NH₂ | 468 | | 1972.06 | 987.81 | 1973.07 | 987.04 | 658.36 |
| 560 | Ac-LTA$r8EYWAQL$AAAAAa-NH₂ | 469 | | 1853.01 | 928.33 | 1854.02 | 927.51 | 618.68 |
| 561 | Ac-LTF$r8EYWAibQL$AAAAAa-NH₂ | 470 | | 1943.06 | 973.48 | 1944.07 | 972.54 | 648.69 |
| 562 | Ac-LTF$r8EYWAQL$AAibAAAa-NH₂ | 471 | | 1943.06 | 973.11 | 1944.07 | 972.54 | 648.69 |
| 563 | Ac-LTF$r8EYWAQL$AAAibAAa-NH₂ | 472 | | 1943.06 | 973.48 | 1944.07 | 972.54 | 648.69 |
| 564 | Ac-LTF$r8EYWAQL$AAAAibAa-NH₂ | 473 | | 1943.06 | 973.48 | 1944.07 | 972.54 | 648.69 |
| 565 | Ac-LTF$r8EYWAQL$AAAAAiba-NH₂ | 474 | | 1943.06 | 973.38 | 1944.07 | 972.54 | 648.69 |
| 566 | Ac-LTF$r8EYWAQL$AAAAAiba-NH₂ | 475 | iso2 | 1943.06 | 973.38 | 1944.07 | 972.54 | 648.69 |
| 567 | Ac-LTF$r8EYWAQL$AAAAAAib-NH₂ | 476 | | 1943.06 | 973.01 | 1944.07 | 972.54 | 648.69 |
| 568 | Ac-LTF$r8EYWAQL$AaAAAa-NH₂ | 477 | | 1929.04 | 966.54 | 1930.05 | 965.53 | 644.02 |
| 569 | Ac-LTF$r8EYWAQL$AAaAAa-NH₂ | 478 | | 1929.04 | 966.35 | 1930.05 | 965.53 | 644.02 |
| 570 | Ac-LTF$r8EYWAQL$AAAaAa-NH₂ | 479 | | 1929.04 | 966.54 | 1930.05 | 965.53 | 644.02 |
| 571 | Ac-LTF$r8EYWAQL$AAAaAa-NH₂ | 480 | iso2 | 1929.04 | 966.35 | 1930.05 | 965.53 | 644.02 |
| 572 | Ac-LTF$r8EYWAQL$AAAAaa-NH₂ | 481 | | 1929.04 | 966.35 | 1930.05 | 965.53 | 644.02 |
| 573 | Ac-LTF$r8EYWAQL$AAAAAA-NH₂ | 482 | | 1929.04 | 966.35 | 1930.05 | 965.53 | 644.02 |
| 574 | Ac-LTF$r8EYWAQL$ASarAAAa-NH₂ | 483 | | 1929.04 | 966.54 | 1930.05 | 965.53 | 644.02 |
| 575 | Ac-LTF$r8EYWAQL$AASarAAa-NH₂ | 484 | | 1929.04 | 966.35 | 1930.05 | 965.53 | 644.02 |
| 576 | Ac-LTF$r8EYWAQL$AAASarAa-NH₂ | 485 | | 1929.04 | 966.35 | 1930.05 | 965.53 | 644.02 |
| 577 | Ac-LTF$r8EYWAQL$AAAASara-NH₂ | 486 | | 1929.04 | 966.35 | 1930.05 | 965.53 | 644.02 |
| 578 | Ac-LTF$r8EYWAQL$AAAAASar-NH₂ | 487 | | 1929.04 | 966.08 | 1930.05 | 965.53 | 644.02 |
| 579 | Ac-7LTF$r8EYWAQL$AAAAAa-NH₂ | 488 | | 1918.07 | 951.99 | 1919.08 | 960.04 | 640.37 |
| 581 | Ac-TF$r8EYWAQL$AAAAAa-NH₂ | 489 | | 1815.96 | 929.85 | 1816.97 | 908.99 | 606.33 |
| 582 | Ac-F$r8EYWAQL$AAAAAa-NH₂ | 490 | | 1714.91 | 930.92 | 1715.92 | 858.46 | 572.64 |
| 583 | Ac-LVF$r8EYWAQL$AAAAAa-NH₂ | 491 | | 1927.06 | 895.12 | 1928.07 | 964.54 | 643.36 |
| 584 | Ac-AAF$r8EYWAQL$AAAAAa-NH₂ | 492 | | 1856.98 | 859.51 | 1857.99 | 929.5 | 620 |
| 585 | Ac-LTF$r8EYWAQL$AAAAa-NH₂ | 493 | | 1858 | 824.08 | 1859.01 | 930.01 | 620.34 |
| 586 | Ac-LTF$r8EYWAQL$AAAa-NH₂ | 494 | | 1786.97 | 788.56 | 1787.98 | 894.49 | 596.66 |
| 587 | Ac-LTF$r8EYWAQL$AAa-NH₂ | 495 | | 1715.93 | 1138.57 | 1716.94 | 858.97 | 572.98 |
| 588 | Ac-LTF$r8EYWAQL$Aa-NH₂ | 496 | | 1644.89 | 1144.98 | 1645.9 | 823.45 | 549.3 |
| 589 | Ac-LTF$r8EYWAQL$a-NH₂ | 497 | | 1573.85 | 1113.71 | 1574.86 | 787.93 | 525.62 |
| 590 | Ac-LTF$r8EYWAQL$AAA-OH | 498 | | 1716.91 | 859.55 | 1717.92 | 859.46 | 573.31 |
| 591 | Ac-LTF$r8EYWAQL$A-OH | 499 | | 1574.84 | 975.14 | 1575.85 | 788.43 | 525.95 |
| 592 | Ac-LTF$r8EYWAQL$AAA-NH₂ | 500 | | 1715.93 | 904.75 | 1716.94 | 858.97 | 572.98 |
| 593 | Ac-LTF$r8EYWAQCba$SAA-OH | 501 | | 1744.91 | 802.49 | 1745.92 | 873.46 | 582.64 |
| 594 | Ac-LTF$r8EYWAQCba$S-OH | 502 | | 1602.83 | 913.53 | 1603.84 | 802.42 | 535.28 |
| 595 | Ac-LTF$r8EYWAQCba$S-NH₂ | 503 | | 1601.85 | 979.58 | 1602.86 | 801.93 | 534.96 |
| 596 | 4-FBzl-LTF$r8EYWAQL$AAAAAa-NH₂ | 504 | | 2009.05 | 970.52 | 2010.06 | 1005.53 | 670.69 |
| 597 | 4-FBzl-LTF$r8EYWAQCba$SAA-NH₂ | 505 | | 1823.93 | 965.8 | 1824.94 | 912.97 | 608.98 |
| 598 | Ac-LTF$r8RYWAQL$AAAAAa-NH₂ | 506 | | 1956.1 | 988.28 | 1957.11 | 979.06 | 653.04 |
| 599 | Ac-LTF$r8HYWAQL$AAAAAa-NH₂ | 507 | | 1937.06 | 1003.54 | 1938.07 | 969.54 | 646.69 |
| 600 | Ac-LTF$r8QYWAQL$AAAAAa-NH₂ | 508 | | 1928.06 | 993.92 | 1929.07 | 965.04 | 643.69 |
| 601 | Ac-LTF$r8CitYWAQL$AAAAAa-NH₂ | 509 | | 1957.08 | 987 | 1958.09 | 979.55 | 653.37 |
| 602 | Ac-LTF$r8GlaYWAQL$AAAAAa-NH₂ | 510 | | 1973.03 | 983 | 1974.04 | 987.52 | 658.68 |
| 603 | Ac-LTF$r8F4gYWAQL$AAAAAa-NH₂ | 511 | | 2004.1 | 937.86 | 2005.11 | 1003.06 | 669.04 |
| 604 | Ac-LTF$r82mRYWAQL$AAAAAa-NH₂ | 512 | | 1984.13 | 958.58 | 1985.14 | 993.07 | 662.38 |
| 605 | Ac-LTF$r8ipKYWAQL$AAAAAa-NH₂ | 513 | | 1970.14 | 944.52 | 1971.15 | 986.08 | 657.72 |
| 606 | Ac-LTF$r8F4NH2YWAQL$AAAAAa-NH₂ | 514 | | 1962.08 | 946 | 1963.09 | 982.05 | 655.03 |
| 607 | Ac-LTF$r8EYWAAL$AAAAAa-NH₂ | 515 | | 1872.02 | 959.32 | 1873.03 | 937.02 | 625.01 |
| 608 | Ac-LTF$r8EYWALL$AAAAAa-NH₂ | 516 | | 1914.07 | 980.88 | 1915.08 | 958.04 | 639.03 |
| 609 | Ac-LTF$r8EYWAAibL$AAAAAa-NH₂ | 517 | | 1886.03 | 970.61 | 1887.04 | 944.02 | 629.68 |
| 610 | Ac-LTF$r8EYWASL$AAAAAa-NH₂ | 518 | | 1888.01 | 980.51 | 1889.02 | 945.01 | 630.34 |
| 611 | Ac-LTF$r8EYWANL$AAAAAa-NH₂ | 519 | | 1915.02 | 1006.41 | 1916.03 | 958.52 | 639.35 |
| 612 | Ac-LTF$r8EYWACitL$AAAAAa-NH₂ | 520 | | 1958.07 | | 1959.08 | 980.04 | 653.7 |
| 613 | Ac-LTF$r8EYWAHL$AAAAAa-NH₂ | 521 | | 1938.04 | 966.24 | 1939.05 | 970.03 | 647.02 |
| 614 | Ac-LTF$r8EYWARL$AAAAAa-NH₂ | 522 | | 1957.08 | | 1958.09 | 979.55 | 653.37 |
| 615 | Ac-LTF$r8EpYWAQL$AAAAAa-NH₂ | 523 | | 2009.01 | | 2010.02 | 1005.51 | 670.68 |
| 616 | Cbm-LTF$r8EYWAQCba$SAA-NH₂ | 524 | | 1590.85 | | 1591.86 | 796.43 | 531.29 |
| 617 | Cbm-LTF$r8EYWAQL$AAAAAa-NH₂ | 525 | | 1930.04 | | 1931.05 | 966.03 | 644.35 |
| 618 | Ac-LTF$r8EYWAQL$SAAAAa-NH₂ | 526 | | 1945.04 | 1005.11 | 1946.05 | 973.53 | 649.35 |
| 619 | Ac-LTF$r8EYWAQL$AAAASa-NH₂ | 527 | | 1945.04 | 986.52 | 1946.05 | 973.53 | 649.35 |
| 620 | Ac-LTF$r8EYWAQL$SAAASa-NH₂ | 528 | | 1961.03 | 993.27 | 1962.04 | 981.52 | 654.68 |
| 621 | Ac-LTF$r8EYWAQTba$AAAAAa-NH₂ | 529 | | 1943.06 | 983.1 | 1944.07 | 972.54 | 648.69 |
| 622 | Ac-LTF$r8EYWAQAdm$AAAAAa-NH₂ | 530 | | 2007.09 | 990.31 | 2008.1 | 1004.55 | 670.04 |
| 623 | Ac-LTF$r8EYWAQCha$AAAAAa-NH₂ | 531 | | 1969.07 | 987.17 | 1970.08 | 985.54 | 657.36 |
| 624 | Ac-LTF$r8EYWAQhCha$AAAAAa-NH₂ | 532 | | 1983.09 | 1026.11 | 1984.1 | 992.55 | 662.04 |
| 625 | Ac-LTF$r8EYWAQF$AAAAAa-NH₂ | 533 | | 1963.02 | 957.01 | 1964.03 | 982.52 | 655.35 |
| 626 | Ac-LTF$r8EYWAQhF$AAAAAa-NH₂ | 534 | | 1977.04 | 1087.81 | 1978.05 | 989.53 | 660.02 |
| 627 | Ac-LTF$r8EYWAQL$AANleAAa-NH₂ | 535 | | 1971.09 | 933.45 | 1972.1 | 986.55 | 658.04 |
| 628 | Ac-LTF$r8EYWAQAdm$AANleAAa-NH₂ | 536 | | 2049.13 | 1017.97 | 2050.14 | 1025.57 | 684.05 |
| 629 | 4-FBz-BaLTF$r8EYWAQL$AAAAAa- | 537 | | 2080.08 | | 2081.09 | 1041.05 | 694.37 |
| | NH₂ | | | | | | | |
| 630 | 4-FBz-BaLTF$r8EYWAQCba$SAA-NH₂ | 538 | | 1894.97 | | 1895.98 | 948.49 | 632.66 |
| 631 | Ac-LTF$r5EYWAQL$s8AAAAAa-NH₂ | 539 | | 1929.04 | 1072.68 | 1930.05 | 965.53 | 644.02 |
| 632 | Ac-LTF$r5EYWAQCba$s8SAA-NH₂ | 540 | | 1743.92 | 1107.79 | 1744.93 | 872.97 | 582.31 |
| 633 | Ac-LTF$r8EYWAQL$AAhhLAAa-NH₂ | 541 | | 1999.12 | | 2000.13 | 1000.57 | 667.38 |
| 634 | Ac-LTF$r8EYWAQL$AAAAAAAa-NH₂ | 542 | | 2071.11 | | 2072.12 | 1036.56 | 691.38 |
| 635 | Ac-LTF$r8EYWAQL$AAAAAAAAa-NH₂ | 543 | | 2142.15 | 778.1 | 2143.16 | 1072.08 | 715.06 |
| 636 | Ac-LTF$r8EYWAQL$AAAAAAAAAa-NH₂ | 544 | | 2213.19 | 870.53 | 2214.2 | 1107.6 | 738.74 |
| 637 | Ac-LTA$r8EYAAQCba$SAA-NH₂ | 545 | | 1552.85 | | 1553.86 | 777.43 | 518.62 |
| 638 | Ac-LTA$r8EYAAQL$AAAAAa-NH₂ | 546 | | 1737.97 | 779.45 | 1738.98 | 869.99 | 580.33 |
| 639 | Ac-LTF$r8EPmpWAQL$AAAAAa-NH₂ | 547 | | 2007.03 | 779.54 | 2008.04 | 1004.52 | 670.02 |
| 640 | Ac-LTF$r8EPmpWAQCba$SAA-NH₂ | 548 | | 1821.91 | 838.04 | 1822.92 | 911.96 | 608.31 |
| 641 | Ac-ATF$r8HYWAQL$S-NH₂ | 549 | | 1555.82 | 867.83 | 1556.83 | 778.92 | 519.61 |
| 642 | Ac-LTF$r8HAWAQL$S-NH₂ | 550 | | 1505.84 | 877.91 | 1506.85 | 753.93 | 502.95 |
| 643 | Ac-LTF$r8HYWAQA$S-NH₂ | 551 | | 1555.82 | 852.52 | 1556.83 | 778.92 | 519.61 |
| 644 | Ac-LTF$r8EYWAQCba$SA-NH₂ | 552 | | 1672.89 | 887.18 | 1673.9 | 837.45 | 558.64 |
| 645 | Ac-LTF$r8EYWAQL$SAA-NH₂ | 553 | | 1731.92 | 873.32 | 1732.93 | 866.97 | 578.31 |
| 646 | Ac-LTF$r8HYWAQCba$SAA-NH₂ | 554 | | 1751.94 | 873.05 | 1752.95 | 876.98 | 584.99 |
| 647 | Ac-LTF$r8SYWAQCba$SAA-NH₂ | 555 | | 1701.91 | 844.88 | 1702.92 | 851.96 | 568.31 |
| 648 | Ac-LTF$r8RYWAQCba$SAA-NH₂ | 556 | | 1770.98 | 865.58 | 1771.99 | 886.5 | 591.33 |
| 649 | Ac-LTF$r8KYWAQCba$SAA-NH₂ | 557 | | 1742.98 | 936.57 | 1743.99 | 872.5 | 582 |
| 650 | Ac-LTF$r8QYWAQCba$SAA-NH₂ | 558 | | 1742.94 | 930.93 | 1743.95 | 872.48 | 581.99 |
| 651 | Ac-LTF$r8EYWAACba$SAA-NH₂ | 559 | | 1686.9 | 1032.45 | 1687.91 | 844.46 | 563.31 |
| 652 | Ac-LTF$r8EYWAQCba$AAA-NH₂ | 560 | | 1727.93 | 895.46 | 1728.94 | 864.97 | 576.98 |
| 653 | Ac-LTF$r8EYWAQL$AAAAA-OH | 561 | | 1858.99 | 824.54 | 1860 | 930.5 | 620.67 |
| 654 | Ac-LTF$r8EYWAQL$AAAA-OH | 562 | | 1787.95 | 894.48 | 1788.96 | 894.98 | 596.99 |
| 655 | Ac-LTF$r8EYWAQL$AA-OH | 563 | | 1645.88 | 856 | 1646.89 | 823.95 | 549.63 |
| 656 | Ac-LTF$r8AF4bOH2WAQL$AAAAAa- | 564 | | | | | | |
| | NH₂ | | | | | | | |
| 657 | Ac-LTF$r8AF4bOH2WAAL$AAAAAa- | 565 | | | | | | |
| | NH₂ | | | | | | | |
| 658 | Ac-LTF$r8EF4bOH2WAQCba$SAA-NH₂ | 566 | | | | | | |
| 659 | Ac-LTF$r8ApYWAQL$AAAAAa-NH₂ | 567 | | | | | | |
| 660 | Ac-LTF$r8ApYWAAL$AAAAAa-NH₂ | 568 | | | | | | |
| 661 | Ac-LTF$r8EpYWAQCba$SAA-NH₂ | 569 | | | | | | |
| 662 | Ac-LTF$rda6AYWAQL$da5AAAAAa- | 570 | | 1974.06 | 934.44 | | | |
| | NH₂ | | | | | | | |
| 663 | Ac-LTF$rda6EYWAQCba$da5SAA-NH₂ | 571 | | 1846.95 | 870.52 | | 869.94 | |
| 664 | Ac-LTF$rda6EYWAQL$da5AAAAAa- | 572 | | | | | | |
| | NH₂ | | | | | | | |
| 665 | Ac-LTF$ra9EYWAQL$a6AAAAAa-NH₂ | 573 | | 936.57 | | 935.51 | | |
| 666 | Ac-LTF$ra9EYWAQL$a6AAAAAa-NH₂ | 574 | | | | | | |
| 667 | Ac-LTF$ra9EYWAQCba$a6SAA-NH₂ | 575 | | | | | | |
| 668 | Ac-LTA$ra9EYWAQCba$a6SAA-NH₂ | 576 | | | | | | |
| 669 | 5-FAM-BaLTF$ra9EYWAQCba$a6SAA- | 577 | | | | | | |
| | NH₂ | | | | | | | |
| 670 | 5-FAM-BaLTF$r8EYWAQL$AAAAAa- | 578 | | 2316.11 | | | | |
| | NH₂ | | | | | | | |
| 671 | 5-FAM-BaLTF$/r8EYWAQL$/AAAAAa- | 579 | | 2344.15 | | | | |
| | NH₂ | | | | | | | |
| 672 | 5-FAM-BaLTA$r8EYWAQL$AAAAAa- | 580 | | 2240.08 | | | | |
| | NH₂ | | | | | | | |
| 673 | 5-FAM-BaLTF$r8AYWAQL$AAAAAa- | 581 | | 2258.11 | | | | |
| | NH₂ | | | | | | | |
| 674 | 5-FAM-BaATF$r8EYWAQL$AAAAAa- | 582 | | 2274.07 | | | | |
| | NH₂ | | | | | | | |
| 675 | 5-FAM-BaLAF$r8EYWAQL$AAAAAa- | 583 | | 2286.1 | | | | |
| | NH₂ | | | | | | | |
| 676 | 5-FAM-BaLTF$r8EAWAQL$AAAAAa- | 584 | | 2224.09 | | | | |
| | NH₂ | | | | | | | |
| 677 | 5-FAM-BaLTF$r8EYAAQL$AAAAAa- | 585 | | 2201.07 | | | | |
| | NH₂ | | | | | | | |
| 678 | 5-FAM-BaLTA$r8EYAAQL$AAAAAa- | 586 | | 2125.04 | | | | |
| | NH₂ | | | | | | | |
| 679 | 5-FAM-BaLTF$r8EYWAAL$AAAAAa- | 587 | | 2259.09 | | | | |
| | NH₂ | | | | | | | |
| 680 | 5-FAM-BaLTF$r8EYWAQA$AAAAAa- | 588 | | 2274.07 | | | | |
| | NH₂ | | | | | | | |
| 681 | 5-FAM-BaLTF$/r8EYWAQCba$/SAA- | 589 | | 2159.03 | | | | |
| | NH₂ | | | | | | | |
| 682 | 5-FAM-BaLTA$r8EYWAQCba$SAA-NH₂ | 590 | | 2054.97 | | | | |
| 683 | 5-FAM-BaLTF$r8EYAAQCba$SAA-NH₂ | 591 | | 2015.96 | | | | |
| 684 | 5-FAM-BaLTA$r8EYAAQCba$SAA-NH₂ | 592 | | 1939.92 | | | | |
| 685 | 5-FAM-BaQSQQTF$r8NLWRLL$QN-NH₂ | 593 | | 2495.23 | | | | |
| 686 | 5-TAMRA-BaLTF$r8EYWAQCba$SAA- | 594 | | 2186.1 | | | | |
| | NH₂ | | | | | | | |
| 687 | 5-TAMRA-BaLTA$r8EYWAQCba$SAA- | 595 | | 2110.07 | | | | |
| | NH₂ | | | | | | | |
| 688 | 5-TAMRA-BaLTF$r8EYAAQCba$SAA- | 596 | | 2071.06 | | | | |
| | NH₂ | | | | | | | |
| 689 | 5-TAMRA-BaLTA$r8EYAAQCba$SAA- | 597 | | 1995.03 | | | | |
| | NH₂ | | | | | | | |
| 690 | 5-TAMRA- | 598 | | 2214.13 | | | | |
| | BaLTF$/r8EYWAQCba$/SAA-NH₂ | | | | | | | |
| 691 | 5-TAMRA-BaLTF$r8EYWAQL$AAAAAa- | 599 | | 2371.22 | | | | |
| | NH₂ | | | | | | | |
| 692 | 5-TAMRA-BaLTA$r8EYWAQL$AAAAAa- | 600 | | 2295.19 | | | | |
| | NH₂ | | | | | | | |
| 693 | 5-TAMRA- | 601 | | 2399.25 | | | | |
| | BaLTF$/r8EYWAQL$/AAAAAa-NH₂ | | | | | | | |
| 694 | Ac-LTF$r8EYWCou7QCba$SAA-OH | 602 | | 1947.93 | | | | |
| 695 | Ac-LTF$r8EYWCou7QCba$S-OH | 603 | | 1805.86 | | | | |
| 696 | Ac-LTA$r8EYWCou7QCba$SAA-NH₂ | 604 | | 1870.91 | | | | |
| 697 | Ac-LTF$r8EYACou7QCba$SAA-NH₂ | 605 | | 1831.9 | | | | |
| 698 | Ac-LTA$r8EYACou7QCba$SAA-NH₂ | 606 | | 1755.87 | | | | |
| 699 | Ac-LTF$/r8EYWCou7QCba$/SAA-NH₂ | 607 | | 1974.98 | | | | |
| 700 | Ac-LTF$r8EYWCou7QL$AAAAAa-NH₂ | 608 | | 2132.06 | | | | |
| 701 | Ac-LTF$/r8EYWCou7QL$/AAAAAa- | 609 | | 2160.09 | | | | |
| | NH₂ | | | | | | | |
| 702 | Ac-LTF$r8EYWCou7QL$AAAAA-OH | 610 | | 2062.01 | | | | |
| 703 | Ac-LTF$r8EYwCou7QL$AAAA-OH | 611 | | 1990.97 | | | | |
| 704 | Ac-LTF$r8EYwCou7QL$AAA-OH | 612 | | 1919.94 | | | | |
| 705 | Ac-LTF$r8EYWCou7QL$AA-OH | 613 | | 1848.9 | | | | |
| 706 | Ac-LTF$r8EYWCou7QL$A-OH | 614 | | 1777.86 | | | | |
| 707 | Ac-LTF$r8EYWAQL$AAAASa-NH₂ | 615 | iso2 | | 974.4 | | 973.53 | |
| 708 | Ac-LTF$r8AYWAAL$AAAAAa-NH₂ | 616 | iso2 | 1814.01 | 908.82 | 1815.02 | 908.01 | 605.68 |
| 709 | Biotin-BaLTF$r8EYWAQL$AAAAAa- | 617 | | 2184.14 | 1093.64 | 2185.15 | 1093.08 | 729.05 |
| | NH₂ | | | | | | | |
| 710 | Ac-LTF$r8HAWAQL$S-NH₂ | 618 | iso2 | 1505.84 | 754.43 | 1506.85 | 753.93 | 502.95 |
| 711 | Ac-LTF$r8EYWAQCba$SA-NH₂ | 619 | iso2 | 1672.89 | 838.05 | 1673.9 | 837.45 | 558.64 |
| 712 | Ac-LTF$r8HYWAQCba$SAA-NH₂ | 620 | iso2 | 1751.94 | 877.55 | 1752.95 | 876.98 | 584.99 |
| 713 | Ac-LTF$r8SYWAQCba$SAA-NH₂ | 621 | iso2 | 1701.91 | 852.48 | 1702.92 | 851.96 | 568.31 |
| 714 | Ac-LTF$r8RYWAQCba$SAA-NH₂ | 622 | iso2 | 1770.98 | 887.45 | 1771.99 | 886.5 | 591.33 |
| 715 | Ac-LTF$r8KYWAQCba$SAA-NH₂ | 623 | iso2 | 1742.98 | 872.92 | 1743.99 | 872.5 | 582 |
| 716 | Ac-LTF$r8EYWAQCba$AAA-NH₂ | 624 | iso2 | 1727.93 | 865.71 | 1728.94 | 864.97 | 576.98 |
| 717 | Ac-LTF$r8EYWAQL$AAAAAaBaC-NH₂ | 625 | | 2103.09 | 1053.12 | 2104.1 | 1052.55 | 702.04 |
| 718 | Ac-LTF$r8EYWAQL$AAAAAadPeg4C- | 626 | | 2279.19 | 1141.46 | 2280.2 | 1140.6 | 760.74 |
| | NH₂ | | | | | | | |
| 719 | Ac-LTA$r8AYWAAL$AAAAAa-NH₂ | 627 | | 1737.98 | 870.43 | 1738.99 | 870 | 580.33 |
| 720 | Ac-LTF$r8AYAAAL$AAAAAa-NH₂ | 628 | | 1698.97 | 851 | 1699.98 | 850.49 | 567.33 |
| 721 | 5-FAM-BaLTF$r8AYWAAL$AAAAAa- | 629 | | 2201.09 | 1101.87 | 2202.1 | 1101.55 | 734.7 |
| | NH₂ | | | | | | | |
| 722 | Ac-LTA$r8AYWAQL$AAAAAa-NH₂ | 630 | | 1795 | 898.92 | 1796.01 | 898.51 | 599.34 |
| 723 | Ac-LTF$r8AYAAQL$AAAAAa-NH₂ | 631 | | 1755.99 | 879.49 | 1757 | 879 | 586.34 |
| 724 | Ac-LTF$rda6AYWAAL$da5AAAAAa- | 632 | | 1807.97 | | 1808.98 | 904.99 | 603.66 |
| | NH₂ | | | | | | | |
| 725 | FITC-BaLTF$r8EYWAQL$AAAAAa-NH₂ | 633 | | 2347.1 | 1174.49 | 2348.11 | 1174.56 | 783.37 |
| 726 | FITC-BaLTF$r8EYWAQCba$SAA-NH₂ | 634 | | 2161.99 | 1082.35 | 2163 | 1082 | 721.67 |
| 733 | Ac-LTF$r8EYWAQL$EAAAAa-NH₂ | 635 | | 1987.05 | 995.03 | 1988.06 | 994.53 | 663.36 |
| 734 | Ac-LTF$r8AYWAQL$EAAAAa-NH₂ | 636 | | 1929.04 | 966.35 | 1930.05 | 965.53 | 644.02 |
| 735 | Ac-LTF$r8EYWAQL$AAAAAaBaKbio- | 637 | | 2354.25 | 1178.47 | 2355.26 | 1178.13 | 785.76 |
| | NH₂ | | | | | | | |
| 736 | Ac-LTF$r8AYWAAL$AAAAAa-NH₂ | 638 | | 1814.01 | 908.45 | 1815.02 | 908.01 | 605.68 |
| 737 | Ac-LTF$r8AYAAAL$AAAAAa-NH₂ | 639 | iso2 | 1698.97 | 850.91 | 1699.98 | 850.49 | 567.33 |
| 738 | Ac-LTF$r8AYAAQL$AAAAAa-NH₂ | 640 | iso2 | 1755.99 | 879.4 | 1757 | 879 | 586.34 |
| 739 | Ac-LTF$r8EYWAQL$EAAAAa-NH₂ | 641 | iso2 | 1987.05 | 995.21 | 1988.06 | 994.53 | 663.36 |
| 740 | Ac-LTF$r8AYWAQL$EAAAAa-NH₂ | 642 | iso2 | 1929.04 | 966.08 | 1930.05 | 965.53 | 644.02 |
| 741 | Ac-LTF$r8EYWAQCba$SAAAAa-NH₂ | 643 | | 1957.04 | 980.04 | 1958.05 | 979.53 | 653.35 |
| 742 | Ac-LTF$r8EYWAQLStAAA$r5AA-NH₂ | 644 | | 2023.12 | 1012.83 | 2024.13 | 1012.57 | 675.38 |
| 743 | Ac-LTF$r8EYWAQL$A$AAA$A-NH₂ | 645 | | 2108.17 | 1055.44 | 2109.18 | 1055.09 | 703.73 |
| 744 | Ac-LTF$r8EYWAQL$AA$AAA$A-NH₂ | 646 | | 2179.21 | 1090.77 | 2180.22 | 1090.61 | 727.41 |
| 745 | Ac-LTF$r8EYWAQL$AAA$AAA$A-NH₂ | 647 | | 2250.25 | 1126.69 | 2251.26 | 1126.13 | 751.09 |
| 746 | Ac-AAALTF$r8EYWAQL$AAA-OH | 648 | | 1930.02 | | 1931.03 | 966.02 | 644.35 |
| 747 | Ac-AAALTF$r8EYWAQL$AAA-NH₂ | 649 | | 1929.04 | 965.85 | 1930.05 | 965.53 | 644.02 |
| 748 | Ac-AAAALTF$r8EYWAQL$AAA-NH₂ | 650 | | 2000.08 | 1001.4 | 2001.09 | 1001.05 | 667.7 |
| 749 | Ac-AAAAALTF$r8EYwAQL$AAA-NH₂ | 651 | | 2071.11 | 1037.13 | 2072.12 | 1036.56 | 691.38 |
| 750 | Ac-AAAAAALTF$r8EYwAQL$AAA-NH₂ | 652 | | 2142.15 | | 2143.16 | 1072.08 | 715.06 |
| 751 | Ac-LTF$rda6EYWAQCba$da6SAA-NH₂ | 653 | iso2 | 1751.89 | 877.36 | 1752.9 | 876.95 | 584.97 |
| 752 | Ac-t$r5wya$r5f4CF3ekllr-NH₂ | 654 | | | 844.25 | | | |
| 753 | Ac-tawy$r5nf4CF3e$r5llr-NH₂ | 655 | | | 837.03 | | | |
| 754 | Ac-tawya$r5f4CF3ek$r5lr-NH₂ | 656 | | | 822.97 | | | |
| 755 | Ac-tawyanf4CF3e$r5llr$r5a-NH₂ | 657 | | | 908.35 | | | |
| 756 | Ac-t$s8wyanf4CF3e$r5llr-NH₂ | 658 | | | 858.03 | | | |
| 757 | Ac-tawy$s8nf4CF3ekll$r5a-NH₂ | 659 | | | 879.86 | | | |
| 758 | Ac-tawya$s8f4CF3ekllr$r5a-NH₂ | 660 | | | 936.38 | | | |
| 759 | Ac-tawy$s8naekll$r5a-NH₂ | 661 | | | 844.25 | | | |
| 760 | 5-FAM-Batawy$s8nf4CF3ekll$r5a- | 662 | | | | | | |
| | NH₂ | | | | | | | |
| 761 | 5-FAM-Batawy$s8naekll$r5a-NH₂ | 663 | | | | | | |
| 762 | Ac-tawy$s8nf4CF3eall$r5a-NH₂ | 664 | | | | | | |
| 763 | Ac-tawy$s8nf4CF3ekll$r5aaaaa- | 665 | | | | | | |
| | NH₂ | | | | | | | |
| 764 | Ac-tawy$s8nf4CF3eall$r5aaaaa- | 666 | | | | | | |
| | NH₂ | | | | | | | |

[0646] TABLE 1a shows a selection of peptidomimetic macrocycles.

TABLE 1a
TABLE 1a shows a selection of peptidomimetic macrocycles.

| | | SEQ | | | | Calc | Calc | Calc |
|---|---|---|---|---|---|---|---|---|
| | | ID | | Exact | Found | (M + | (M + | (M + |
| SP | Sequence | NO: | Isomer | Mass | Mass | 1)/1 | 2)/2 | 3)/3 |
| 244 | Ac-LTF$r8EF4coohWAQCba$SANleA- | 667 | | 1885 | 943.59 | 1886.01 | 943.51 | 629.34 |
| | NH₂ | | | | | | | |
| 331 | Ac-LTF$r8EYWAQL$AAAAAa-NH₂ | 668 | iso2 | 1929.04 | 966.08 | 1930.05 | 965.53 | 644.02 |
| 555 | Ac-LTF$r8EY6clWAQL$AAAAAa-NH₂ | 669 | | 1963 | 983.28 | 1964.01 | 982.51 | 655.34 |
| 557 | Ac-AAALTF$r8EYWAQL$AAAAAa-NH₂ | 670 | | 2142.15 | 1072.83 | 2143.16 | 1072.08 | 715.06 |
| 558 | Ac-LTF34F2$r8EYWAQL$AAAAAa-NH₂ | 671 | | 1965.02 | 984.3 | 1966.03 | 983.52 | 656.01 |
| 562 | Ac-LTF$r8EYWAQL$AAibAAAa-NH₂ | 672 | | 1943.06 | 973.11 | 1944.07 | 972.54 | 648.69 |
| 564 | Ac-LTF$r8EYWAQL$AAAAibAa-NH₂ | 673 | | 1943.06 | 973.48 | 1944.07 | 972.54 | 648.69 |
| 566 | Ac-LTF$r8EYWAQL$AAAAAiba-NH₂ | 674 | iso2 | 1943.06 | 973.38 | 1944.07 | 972.54 | 648.69 |
| 567 | Ac-LTF$r8EYWAQL$AAAAAAib-NH₂ | 675 | | 1943.06 | 973.01 | 1944.07 | 972.54 | 648.69 |
| 572 | Ac-LTF$r8EYWAQL$AAAAaa-NH₂ | 676 | | 1929.04 | 966.35 | 1930.05 | 965.53 | 644.02 |
| 573 | Ac-LTF$r8EYWAQL$AAAAAA-NH₂ | 677 | | 1929.04 | 966.35 | 1930.05 | 965.53 | 644.02 |
| 578 | Ac-LTF$r8EYWAQL$AAAAASar-NH₂ | 678 | | 1929.04 | 966.08 | 1930.05 | 965.53 | 644.02 |
| 551 | Ac-LTF$r8EYWAQL$AAAAAa-OH | 679 | iso2 | 1930.02 | 965.89 | 1931.03 | 966.02 | 644.35 |
| 662 | Ac-LTF$rda6AYWAQL$da5AAAAAa- | 680 | | 1974.06 | 934.44 | | 933.49 | |
| | NH₂ | | | | | | | |
| 367 | 5-FAM-BaLTF$r8EYWAQCba$SAA-NH₂ | 681 | | 2131 | 1067.09 | 2132.01 | 1066.51 | 711.34 |
| 349 | Ac-LTF$r8EF4coohWAQCba$AAAAAa- | 682 | iso2 | 1969.04 | 986.06 | 1970.05 | 985.53 | 657.35 |
| | NH₂ | | | | | | | |
| 347 | Ac-LTF$r8EYWAQCba$AAAAAa-NH₂ | 683 | iso2 | 1941.04 | 972.55 | 1942.05 | 971.53 | 648.02 |

[0647] TABLE 1b shows a further selection of peptidomimetic macrocycles.

TABLE 1b
TABLE 1b shows a further selection of peptidomimetic macrocycles.

| | | SEQ | | | | Calc | Calc | Calc |
|---|---|---|---|---|---|---|---|---|
| | | ID | | Exact | Found | (M + | (M + | (M + |
| SP | Sequence | NO: | Isomer | Mass | Mass | 1)/1 | 2)/2 | 3)/3 |
| 581 | Ac-TF$r8EYWAQL$AAAAAa-NH₂ | 684 | | 1815.96 | 929.85 | 1816.97 | 908.99 | 606.33 |
| 582 | Ac-F$r8EYWAQL$AAAAAa-NH₂ | 685 | | 1714.91 | 930.92 | 1715.92 | 858.46 | 572.64 |
| 583 | Ac-LVF$r8EYWAQL$AAAAAa- | 686 | | 1927.06 | 895.12 | 1928.07 | 964.54 | 643.36 |
| | NH₂ | | | | | | | |
| 584 | Ac-AAF$r8EYWAQL$AAAAAa- | 687 | | 1856.98 | 859.51 | 1857.99 | 929.5 | 620 |
| | NH₂ | | | | | | | |
| 585 | Ac-LTF$r8EYWAQL$AAAAa-NH₂ | 688 | | 1858 | 824.08 | 1859.01 | 930.01 | 620.34 |
| 586 | Ac-LTF$r8EYWAQL$AAAa-NH₂ | 689 | | 1786.97 | 788.56 | 1787.98 | 894.49 | 596.66 |
| 587 | Ac-LTF$r8EYWAQL$AAa-NH₂ | 690 | | 1715.93 | 1138.57 | 1716.94 | 858.97 | 572.98 |
| 588 | Ac-LTF$r8EYwAQL$Aa-NH₂ | 691 | | 1644.89 | 1144.98 | 1645.9 | 823.45 | 549.3 |
| 589 | Ac-LTF$r8EYWAQL$a-NH₂ | 692 | | 1573.85 | 1113.71 | 1574.86 | 787.93 | 525.62 |

[0648] In the sequences shown above and elsewhere, the following abbreviations are used: “Nle” represents norleucine, “Aib” represents 2-aminoisobutyric acid, “Ac” represents acetyl, and “Pr” represents propionyl. Amino acids represented as “$” are alpha-Me S5-pentenyl-alanine olefin amino acids connected by an all-carbon crosslinker comprising one double bond. Amino acids represented as “$r5” are alpha-Me R5-pentenyl-alanine olefin amino acids connected by an all-carbon comprising one double bond. Amino acids represented as “$s8” are alpha-Me S8-octenyl-alanine olefin amino acids connected by an all-carbon crosslinker comprising one double bond. Amino acids represented as “$r8” are alpha-Me R8-octenyl-alanine olefin amino acids connected by an all-carbon crosslinker comprising one double bond. “Ahx” represents an aminocyclohexyl linker.

[0649] The crosslinkers are linear all-carbon crosslinker comprising eight or eleven carbon atoms between the alpha carbons of each amino acid. Amino acids represented as “$/” are alpha-Me S5-pentenyl-alanine olefin amino acids that are not connected by any crosslinker. Amino acids represented as “$/r5” are alpha-Me R5-pentenyl-alanine olefin amino acids that are not connected by any crosslinker. Amino acids represented as “$/s8” are alpha-Me S8-octenyl-alanine olefin amino acids that are not connected by any crosslinker. Amino acids represented as “$/r8” are alpha-Me R8-octenyl-alanine olefin amino acids that are not connected by any crosslinker.

[0650] Amino acids represented as “Amw” are alpha-Me tryptophan amino acids. Amino acids represented as “Aml” are alpha-Me leucine amino acids. Amino acids represented as “Amf” are alpha-Me phenylalanine amino acids. Amino acids represented as “2ff” are 2-fluoro-phenylalanine amino acids. Amino acids represented as “3ff” are 3-fluoro-phenylalanine amino acids. Amino acids represented as “St” are amino acids comprising two pentenyl-alanine olefin side chains, each of which is crosslinked to another amino acid as indicated. Amino acids represented as “St//” are amino acids comprising two pentenyl-alanine olefin side chains that are not crosslinked. Amino acids represented as “% St” are amino acids comprising two pentenyl-alanine olefin side chains, each of which is crosslinked to another amino acid as indicated via fully saturated hydrocarbon crosslinks. Amino acids represented as “Ba” are beta-alanine. The lower-case character “e” or “z” within the designation of a crosslinked amino acid (e.g. “$er8” or “$zr8”) represents the configuration of the double bond (E or Z, respectively). In other contexts, lower-case letters such as “a” or “f” represent D amino acids (e.g. D-alanine, or D-phenylalanine, respectively).

[0651] Amino acids designated as “NmW” represent N-methyltryptophan. Amino acids designated as “NmY” represent N-methyltyrosine. Amino acids designated as “NmA” represent N-methylalanine. “Kbio” represents a biotin group attached to the side chain amino group of a lysine residue. Amino acids designated as “Sar” represent sarcosine. Amino acids designated as “Cha” represent cyclohexyl alanine. Amino acids designated as “Cpg” represent cyclopentyl glycine. Amino acids designated as “Chg” represent cyclohexyl glycine. Amino acids designated as “Cba” represent cyclobutyl alanine. Amino acids designated as “F4I” represent 4-iodo phenylalanine. “7L” represents N15 isotopic leucine. Amino acids designated as “F3Cl” represent 3-chloro phenylalanine. Amino acids designated as “F4cooh” represent 4-carboxy phenylalanine. Amino acids designated as “F34F2” represent 3,4-difluoro phenylalanine. Amino acids designated as “6clW” represent 6-chloro tryptophan. Amino acids designated as “$rda6” represent alpha-Me R6-hexynyl-alanine alkynyl amino acids, crosslinked via a dialkyne bond to a second alkynyl amino acid.

[0652] Amino acids designated as “$da5” represent alpha-Me S5-pentynyl-alanine alkynyl amino acids, wherein the alkyne forms one half of a dialkyne bond with a second alkynyl amino acid. Amino acids designated as “$ra9” represent alpha-Me R9-nonynyl-alanine alkynyl amino acids, crosslinked via an alkyne metathesis reaction with a second alkynyl amino acid. Amino acids designated as “$a6” represent alpha-Me S6-hexynyl-alanine alkynyl amino acids, crosslinked via an alkyne metathesis reaction with a second alkynyl amino acid. The designation “iso1” or “iso2” indicates that the peptidomimetic macrocycle is a single isomer.

[0653] Amino acids designated as “Cit” represent citrulline. Amino acids designated as “Cou4”, “Cou6”, “Cou7” and “Cou8”, respectively, represent the following structures:

[chemical structure]

[chemical structure]

[0654] In some embodiments, a peptidomimetic macrocycle is obtained in more than one isomer, for example due to the configuration of a double bond within the structure of the crosslinker (E vs Z). Such isomers can or cannot be separable by conventional chromatographic methods. In some embodiments, one isomer has improved biological properties relative to the other isomer. In one embodiment, an E crosslinker olefin isomer of a peptidomimetic macrocycle has better solubility, better target affinity, better in vivo or in vitro efficacy, higher helicity, or improved cell permeability relative to its Z counterpart. In another embodiment, a Z crosslinker olefin isomer of a peptidomimetic macrocycle has better solubility, better target affinity, better in vivo or in vitro efficacy, higher helicity, or improved cell permeability relative to its E counterpart.

[0655] TABLE 1c shows exemplary peptidomimetic macrocycles.

TABLE 1c

| | SEQ | |
|---|---|---|
| | ID | |
| SP# | NO: | Structure |
| 154 | 163 | [chemical structure] |
| 115 | 124 | [chemical structure] |
| 114 | 123 | [chemical structure] |
| 99 | 108 | [chemical structure] |
| 388 | 397 | [chemical structure] |
| 331 | 340 | [chemical structure] |
| 445 | 454 | [chemical structure] |
| 351 | 360 | [chemical structure] |
| 71 | 80 | [chemical structure] |
| 69 | 78 | [chemical structure] |
| 7 | 16 | [chemical structure] |
| 160 | 169 | [chemical structure] |
| 315 | 324 | [chemical structure] |
| 249 | 258 | [chemical structure] |
| 437 | 446 | [chemical structure] |
| 349 | 358 | [chemical structure] |
| 555 | 464 | [chemical structure] |
| 557 | 466 | [chemical structure] |
| 558 | 467 | [chemical structure] |
| 367 | 376 | [chemical structure] |
| 562 | 471 | [chemical structure] |
| 564 | 473 | [chemical structure] |
| 566 | 475 | [chemical structure] |
| 567 | 476 | [chemical structure] |
| 572 | 481 | [chemical structure] |
| 573 | 482 | [chemical structure] |
| 578 | 487 | [chemical structure] |
| 664 | 572 | [chemical structure] |
| 662 | 572 | [chemical structure] |
| | 1500 | [chemical structure] |

[0656] In some embodiments, peptidomimetic macrocycles exclude peptidomimetic macrocycles shown in TABLE 2a:

TABLE 2a

| Sequence | SEQ ID NO: |
|---|---|
| L$r5QETESD$s8WKLLPEN | 693 |
| LSQ$r5TESDLW$s8LLPEN | 694 |
| LSQE$r5FSDLWK$s8LPEN | 695 |
| LSQET$r5SDLWKL$s8PEN | 696 |
| LSQETF$r5DLWKLL$s8EN | 697 |
| LXQETES$r5LWKLLP$s8N | 698 |
| LSQETESD$r5WKLLPE$s8 | 699 |
| LSQQTF$r5DLWKLL$s8EN | 700 |
| LSQETF$r5DLWKLL$s8QN | 701 |
| LSQQTF$r5DLWKLL$s8QN | 702 |
| LSQETF$r5NLWKLL$s8QN | 703 |
| LSQQTF$r5NLWKLL$s8QN | 704 |
| LSQQTF$r5NLWRLL$s8QN | 705 |
| QSQQTF$r5NLWKLL$s8QN | 706 |
| QSQQTF$r5NLWRLL$s8QN | 707 |
| QSQQTA$r5NLWRLL$s8QN | 708 |
| L$r8QETFSD$WKLLPEN | 709 |
| LSQ$r8TFSDLW$LLPEN | 710 |
| LSQE$r8FSDLWK$LPEN | 711 |
| LSQET$r8SDLWKL$PEN | 712 |
| LSQETF$r8DLWKLL$EN | 713 |
| LXQETFS$r8LWKLLP$N | 714 |
| LSQETFSD$r8WKLLPE$ | 715 |
| LSQQTF$r8DLWKLL$EN | 716 |
| LSQETF$r8DLWKLL$QN | 717 |
| LSQQTF$r8DLWKLL$QN | 718 |
| LSQETF$r8NLWKLL$QN | 719 |
| LSQQTF$r8NLWKLL$QN | 720 |
| LSQQTF$r8NLWRLL$QN | 721 |
| QSQQTF$r8NLWKLL$QN | 722 |
| QSQQTF$r8NLWRLL$QN | 723 |
| QSQQTA$r8NLWRLL$QN | 724 |
| QSQQTF$r8NLWRKK$QN | 725 |
| QQTF$r8DLWRLL$EN | 726 |
| QQTF$r8DLWRLL$ | 727 |
| LSQQTF$DLW$LL | 728 |
| QQTF$DLW$LL | 729 |
| QQTA$r8DLWRLL$EN | 730 |
| QSQQTF$r5NLWRLL$s8QN | 731 |
| (dihydroxylated olefin) | |
| QSQQTA$r5NLWRLL$s8QN | 732 |
| (dihydroxylated olefin) | |
| QSQQTF$r8DLWRLL$QN | 733 |
| QTF$r8NLWRLL$ | 734 |
| QSQQTF$NLW$LLPQN | 735 |
| QS$QTF$NLWRLLPQN | 736 |
| $TFS$LWKLL | 737 |
| ETF$DLW$LL | 738 |
| QTF$NLW$LL | 739 |
| $SQE$FSNLWKLL | 740 |

[0657] In TABLE 2a, the peptides can comprise an N-terminal capping group such as acetyl or an additional linker such as beta-alanine between the capping group and the start of the peptide sequence.

[0658] In some embodiments, peptidomimetic macrocycles do not comprise a peptidomimetic macrocycle structure as shown in TABLE 2a.

[0659] In some embodiments, peptidomimetic macrocycles exclude those shown in TABLE 2b:

TABLE 2b

| | | SEQ | | | Observed mass |
|---|---|---|---|---|---|
| SP | Sequence | ID NO: | Exact Mass | M + 2 | (m/e) |
| 1 | Ac-LSQETF$r8DLWKLL$EN-NH₂ | 741 | 2068.13 | 1035.07 | 1035.36 |
| 2 | Ac-LSQETF$r8NLWKLL$QN-NH₂ | 742 | 2066.16 | 1034.08 | 1034.31 |
| 3 | Ac-LSQQTF$r8NLWRLL$QN-NH₂ | 743 | 2093.18 | 1047.59 | 1047.73 |
| 4 | Ac-QSQQTF$r8NLWKLL$QN-NH₂ | 744 | 2080.15 | 1041.08 | 1041.31 |
| 5 | Ac-QSQQTF$r8NLWRLL$QN-NH₂ | 745 | 2108.15 | 1055.08 | 1055.32 |
| 6 | Ac-QSQQTA$r8NLWRLL$QN-NH₂ | 746 | 2032.12 | 1017.06 | 1017.24 |
| 7 | Ac-QAibQQTF$r8NLWRLL$QN-NH₂ | 747 | 2106.17 | 1054.09 | 1054.34 |
| 8 | Ac-QSQQTFSNLWRLLPQN-NH₂ | 748 | 2000.02 | 1001.01 | 1001.26 |
| 9 | Ac-QSQQTF$/r8NLwRLLVQN-NH₂ | 749 | 2136.18 | 1069.09 | 1069.37 |
| 10 | Ac-QSQAibTF$r8NLWRLL$QN-NH₂ | 750 | 2065.15 | 1033.58 | 1033.71 |
| 11 | Ac-QSQQTF$r8NLWRLL$AN-NH₂ | 751 | 2051.13 | 1026.57 | 1026.70 |
| 12 | Ac-ASQQTF$r8NLWRLL$QN-NH₂ | 752 | 2051.13 | 1026.57 | 1026.90 |
| 13 | Ac-QSQQTF$r8ALWRLL$QN-NH₂ | 753 | 2065.15 | 1033.58 | 1033.41 |
| 14 | Ac-QSQETF$r8NLWRLL$QN-NH₂ | 754 | 2109.14 | 1055.57 | 1055.70 |
| 15 | Ac-RSQQTF$r8NLWRLL$QN-NH₂ | 755 | 2136.20 | 1069.10 | 1069.17 |
| 16 | Ac-RSQQTF$r8NLWRLL$EN-NH₂ | 756 | 2137.18 | 1069.59 | 1069.75 |
| 17 | Ac-LSQETFSDLWKLLPEN-NH₂ | 757 | 1959.99 | 981.00 | 981.24 |
| 18 | Ac-QSQ$TFS$LWRLLPQN-NH₂ | 758 | 2008.09 | 1005.05 | 1004.97 |
| 19 | Ac-QSQQ$FSN$WRLLPQN-NH₂ | 759 | 2036.06 | 1019.03 | 1018.86 |
| 20 | Ac-QSQQT$SNL$RLLPQN-NH₂ | 760 | 1917.04 | 959.52 | 959.32 |
| 21 | Ac-QSQQTF$NLW$LLPQN-NH₂ | 761 | 2007.06 | 1004.53 | 1004.97 |
| 22 | Ac-RTQATF$r8NQWAibANle$TNAibTR-NH₂ | 762 | 2310.26 | 1156.13 | 1156.52 |
| 23 | Ac-QSQQTF$r8NLWRLL$RN-NH₂ | 763 | 2136.20 | 1069.10 | 1068.94 |
| 24 | Ac-QSQRTF$r8NLWRLL$QN-NH₂ | 764 | 2136.20 | 1069.10 | 1068.94 |
| 25 | Ac-QSQQTF$r8NNleWRLL$QN-NH₂ | 765 | 2108.15 | 1055.08 | 1055.44 |
| 26 | Ac-QSQQTF$r8NLWRNleL$QN-NH₂ | 766 | 2108.15 | 1055.08 | 1055.84 |
| 27 | Ac-QSQQTF$r8NLWRLNle$QN-NH₂ | 767 | 2108.15 | 1055.08 | 1055.12 |
| 28 | Ac-QSQQTY$r8NLWRLL$QN-NH₂ | 768 | 2124.15 | 106108 | 1062.92 |
| 29 | Ac-RAibQQTF$r8NLWRLL$QN-NH₂ | 769 | 2134.22 | 1068.11 | 1068.65 |
| 30 | Ac-MPRFMDYWEGLN-NH₂ | 770 | 1598.70 | 800.35 | 800.45 |
| 31 | Ac-RSQQRF$r8NLwRLL$QN-NH₂ | 771 | 2191.25 | 1096.63 | 1096.83 |
| 32 | Ac-QSQQRF$r8NLWRLL$QN-NH₂ | 772 | 2163.21 | 1082.61 | 1082.87 |
| 33 | Ac-RAibQQRF$r8NLWRLL$QN-NH₂ | 773 | 2189.27 | 1095.64 | 1096.37 |
| 34 | Ac-RSQQRF$r8NFwRLL$QN-NH₂ | 774 | 2225.23 | 1113.62 | 1114.37 |
| 35 | Ac-RSQQRF$r8NYWRLL$QN-NH₂ | 775 | 2241.23 | 1121.62 | 1122.37 |
| 36 | Ac-RSQQTF$r8NLWQLL$QN-NH₂ | 776 | 2108.15 | 1055.08 | 1055.29 |
| 37 | Ac-QSQQTF$r8NLWQAmlL$QN-NH₂ | 777 | 2094.13 | 1048.07 | 1048.32 |
| 38 | Ac-QSQQTF$r8NAmlWRLL$QN-NH₂ | 778 | 2122.17 | 1062.09 | 1062.35 |
| 39 | Ac-NlePRF$r8DYWEGL$QN-NH₂ | 779 | 1869.98 | 935.99 | 936.20 |
| 40 | Ac-NlePRF$r8NYWRLL$QN-NH₂ | 780 | 1952.12 | 977.06 | 977.35 |
| 41 | Ac-RF$r8NLWRLL$Q-NH₂ | 781 | 1577.96 | 789.98 | 790.18 |
| 42 | Ac-QSQQTF$r8N2ffWRLL$QN-NH₂ | 782 | 2160.13 | 1081.07 | 1081.40 |
| 43 | Ac-QSQQTF$r8N3ffWRLL$QN-NH₂ | 783 | 2160.13 | 1081.07 | 1081.34 |
| 44 | Ac-QSQQTF#r8NLWRLL#QN-NH₂ | 784 | 2080.12 | 1041.06 | 1041.34 |
| 45 | Ac-RSQQTA$r8NLWRLL$QN-NH₂ | 785 | 2060.16 | 1031.08 | 1031.38 |
| 46 | Ac-QSQQTF%r8NLWRLL%QN-NH₂ | 786 | 2110.17 | 1056.09 | 1056.55 |
| 47 | HepQSQ$TFSNLWRLLPQN-NH₂ | 787 | 2051.10 | 1026.55 | 1026.82 |
| 48 | HepQSQ$TF$r8NLWRLL$QN-NH₂ | 788 | 2159.23 | 1080.62 | 1080.89 |
| 49 | Ac-QSQQTF$r8NL6clWRLL$QN-NH₂ | 789 | 2142.11 | 1072.06 | 1072.35 |
| 50 | Ac-QSQQTF$r8NLMe6c1wRLL$QN-NH₂ | 790 | 2156.13 | 1079.07 | 1079.27 |
| 51 | Ac-LTFEHYWAQLTS-NH₂ | 791 | 1535.74 | 768.87 | 768.91 |
| 52 | Ac-LTF$HYW$QLTS-NH₂ | 792 | 1585.83 | 791.92 | 761.67 |
| 53 | Ac-LTFE$YWA$LTS-NH₂ | 793 | 1520.79 | 761.40 | 761.67 |
| 54 | Ac-LTF$zr8HYWAQL$zS-NH₂ | 794 | 1597.87 | 799.94 | 800.06 |
| 55 | Ac-LTF$r8HYWRQL$S-NH₂ | 795 | 1682.93 | 842.47 | 842.72 |
| 56 | Ac-QS$QTFStNLWRLL$s8QN-NH₂ | 796 | 2145.21 | 1071.61 | 1073.90 |
| 57 | Ac-QSQQTASNLWRLLPQN-NH₂ | 797 | 1923.99 | 961.00 | 961.26 |
| 58 | Ac-QSQQTA$/r8NLwRLL$NN-NH₂ | 798 | 2060.15 | 1031.08 | 1031.24 |
| 59 | Ac-ASQQTF$/r8NLwRLL$NN-NH₂ | 799 | 2079.16 | 1040.58 | 1040.89 |
| 60 | Ac-$SQQ$FSNLWRLLAibQN-NH₂ | 800 | 2009.09 | 1005.55 | 1005.86 |
| 61 | Ac-QS$QTF$NLwRLLAibQN-NH₂ | 801 | 2023.10 | 1012.55 | 1012.79 |
| 62 | Ac-QSQQ$FSN$WRLLAibQN-NH₂ | 802 | 2024.06 | 1013.03 | 1011.31 |
| 63 | Ac-QSQQTF$NLW$LLAibQN-NH₂ | 803 | 1995.06 | 998.53 | 998.87 |
| 64 | Ac-QSQQTFS$LWR$LAibQN-NH₂ | 804 | 2011.06 | 1006.53 | 1006.83 |
| 65 | Ac-QSQQTFSNLW$LLA$N-NH₂ | 805 | 1940.02 | 971.01 | 971.29 |
| 66 | Ac-$/SQQ$/FSNLWRLLAibQN-NH₂ | 806 | 2037.12 | 1019.56 | 1019.78 |
| 67 | Ac-QS$NTFVNLwRLLAibQN-NH₂ | 807 | 2051.13 | 1026.57 | 1026.90 |
| 68 | Ac-QSQQ$/FSN$/WRLLAibQN-NH₂ | 808 | 2052.09 | 1027.05 | 1027.36 |
| 69 | Ac-QSQQTFVNLWVLLAibQN-NH₂ | 809 | 2023.09 | 1012.55 | 1013.82 |
| 70 | Ac-QSQ$TFS$LWRLLAibQN-NH₂ | 810 | 1996.09 | 999.05 | 999.39 |
| 71 | Ac-QSQ$/TFS$/LWRLLAibQN-NH₂ | 811 | 2024.12 | 1011.06 | 1011.37 |
| 72 | Ac-QS$/QTFSt//NLWRLL$/s8QN-NH₂ | 812 | 2201.27 | 1101.64 | 1101.00 |
| 73 | Ac-$r8SQQTFS$LWRLLAibQN-NH₂ | 813 | 2038.14 | 1020.07 | 1020.23 |
| 74 | Ac-QSQ$r8TFSNLW$LLAibQN-NH₂ | 814 | 1996.08 | 999.04 | 999.32 |
| 75 | Ac-QSQQTFS$r8LWRLLA$N-NH₂ | 815 | 2024.12 | 1011.06 | 1011.37 |
| 76 | Ac-QS$r5QTFStNLW$LLAibQN-NH₂ | 816 | 2032.12 | 1017.06 | 1017.39 |
| 77 | Ac-$/r8SQQTFS$/LWRLLAibQN-NH₂ | 817 | 2066.17 | 1034.09 | 1034.80 |
| 78 | Ac-QSQ$/r8TFSNLW$/LLAibQN-NH₂ | 818 | 2024.11 | 1011.06 | 1014.34 |
| 79 | Ac-QSQQTFS$/r8LWRLLA$/N-NH₂ | 819 | 2052.15 | 1027.08 | 1027.16 |
| 80 | Ac-QS$/r5QTFSt//NLW$/LLAibQN-NH₂ | 820 | 2088.18 | 1045.09 | 1047.10 |
| 81 | Ac-QSQQTFSNLWRLLAibQN-NH₂ | 821 | 1988.02 | 995.01 | 995.31 |
| 82 | Hep/QSQ$/TF$/r8NLWRLL$/QN-NH₂ | 822 | 2215.29 | 1108.65 | 1108.93 |
| 83 | Ac-ASQQTF$r8NLRWLL$QN-NH₂ | 823 | 2051.13 | 1026.57 | 1026.90 |
| 84 | Ac-QSQQTF$/r8NLWRLLS/Q-NH₂ | 824 | 2022.14 | 1012.07 | 1012.66 |
| 85 | Ac-QSQQTF$r8NLWRLL$Q-NH₂ | 825 | 1994.11 | 998.06 | 998.42 |
| 86 | Ac-AAARAA$r8AAARAA$AA-NH₂ | 826 | 1515.90 | 758.95 | 759.21 |
| 87 | Ac-LTFEHYWAQLTSA-NH₂ | 827 | 1606.78 | 804.39 | 804.59 |
| 88 | Ac-LTF$r8HYWAQL$SA-NH₂ | 828 | 1668.90 | 835.45 | 835.67 |
| 89 | Ac-ASQQTFSNLWRLLPQN-NH₂ | 829 | 1943.00 | 972.50 | 971.27 |
| 90 | Ac-QS$QTFStNLW$r5LLAibQN-NH₂ | 830 | 2032.12 | 1017.06 | 1017.30 |
| 91 | Ac-QSQQTFAibNLWRLLAibQN-NH₂ | 831 | 1986.04 | 994.02 | 994.19 |
| 92 | Ac-QSQQTFNleNLWRLLNleQN-NH₂ | 832 | 2042.11 | 1022.06 | 1022.23 |
| 93 | Ac-QSQQTF$/r8NLWRLLAibQN-NH₂ | 833 | 2082.14 | 1042.07 | 1042.23 |
| 94 | Ac-QSQQTF$/r8NLWRLLNleQN-NH₂ | 834 | 2110.17 | 1056.09 | 1056.29 |
| 95 | Ac-QSQQTFAibNLWRLLS/QN-NH₂ | 835 | 2040.09 | 1021.05 | 1021.25 |
| 96 | Ac-QSQQTFNleNLWRLL$/QN-NH₂ | 836 | 2068.12 | 1035.06 | 1035.31 |
| 97 | Ac-QSQQTF%r8NL6clWRNleL%QN-NH₂ | 837 | 2144.13 | 1073.07 | 1071.32 |
| 98 | Ac-QSQQTF%r8NLMe6clWRLL%QN-NH₂ | 838 | 2158.15 | 1080.08 | 1080.31 |
| 101 | Ac-FNle$YWE$L-NH₂ | 839 | 1160.63 | — | 1161.70 |
| 102 | Ac-F$r8AYWELL$A-NH₂ | 840 | 1344.75 | — | 1345.90 |
| 103 | Ac-F$r8AYWQLL$A-NH₂ | 841 | 1341.76 | — | 1344.83 |
| 104 | Ac-NlePRF$r8NYWELL$QN-NH₂ | 842 | 1925.06 | 96153 | 961.69 |
| 105 | Ac-NlePRF$r8DYWRLL$QN-NH₂ | 843 | 1953.10 | 977.55 | 977.68 |
| 106 | Ac-NlePRFSr8NYWRLLSQ-NH₂ | 844 | 1838.07 | 920.04 | 920.18 |
| 107 | Ac-NlePRF$r8NYWRLL$-NH₂ | 845 | 1710.01 | 856.01 | 856.13 |
| 108 | Ac-QSQQTFSr8DLWRLLSQN-NH₂ | 846 | 2109.14 | 1055.57 | 1055.64 |
| 109 | Ac-QSQQTFSr8NLWRLLSEN-NH₂ | 847 | 2109.14 | 1055.57 | 1055.70 |
| 110 | Ac-QSQQTFSr8NLWRLLSQD-NH₂ | 848 | 2109.14 | 1055.57 | 1055.64 |
| 111 | Ac-QSQQTF$r8NLWRLL$S-NH₂ | 849 | 1953.08 | 977.54 | 977.60 |
| 112 | Ac-ESQQTFSr8NLWRLLSQN-NH₂ | 850 | 2109.14 | 1055.57 | 1055.70 |
| 113 | Ac-LTFSr8NLWRNleLSQ-NH₂ | 851 | 1635.99 | 819.00 | 819.10 |
| 114 | Ac-LRFSr8NLWRNleLSQ-NH₂ | 852 | 1691.04 | 846.52 | 846.68 |
| 115 | Ac-QSQQTFSr8NWWRNleLSQN-NH₂ | 853 | 2181.15 | 1091.58 | 1091.64 |
| 116 | Ac-QSQQTFSr8NLWRNleLSQ-NH₂ | 854 | 1994.11 | 998.06 | 998.07 |
| 117 | Ac-QTFSr8NLWRNleLSQN-NH₂ | 855 | 1765.00 | 883.50 | 883.59 |
| 118 | Ac-NlePRFSr8NWWRLLSQN-NH₂ | 856 | 1975.13 | 988.57 | 988.75 |
| 119 | Ac-NlePRFSr8NWWRLLSA-NH₂ | 857 | 1804.07 | 903.04 | 903.08 |
| 120 | Ac-TSFAEYWNLLNH₂ | 858 | 1467.70 | 734.85 | 734.90 |
| 121 | Ac-QTF$r8HWWSQL$S-NH₂ | 859 | 1651.85 | 826.93 | 827.12 |
| 122 | Ac-FM$YWE$L-NH₂ | 860 | 1178.58 | — | 1179.64 |
| 123 | Ac-QTFEHWWSQLLS-NH₂ | 861 | 1601.76 | 801.88 | 801.94 |
| 124 | Ac-QSQQTFSr8NLAmwRLNleSQN-NH₂ | 862 | 2122.17 | 1062.09 | 1062.24 |
| 125 | Ac-FMAibY6clWEAc3cL-NH₂ | 863 | 1130.47 | — | 1131.53 |
| 126 | Ac-FNle$Y6clWE$L-NH₂ | 864 | 1194.59 | — | 1195.64 |
| 127 | Ac-FSzr8AY6clWEAc3cLSz-NH₂ | 865 | 1277.63 | 639.82 | 1278.71 |
| 128 | Ac-FSr8AY6clWEAc3cLSA-NH₂ | 866 | 1348.66 | — | 1350.72 |
| 129 | Ac-NlePRFSr8NY6clWRLLSQN-NH₂ | 867 | 1986.08 | 994.04 | 994.64 |
| 130 | Ac-AF$r8AAWALA$A-NH₂ | 868 | 1223.71 | — | 1224.71 |
| 131 | Ac-TFSr8AAWRLASQ-NH₂ | 869 | 1395.80 | 698.90 | 399.04 |
| 132 | Pr-TFSr8AAWRLASQ-NH₂ | 870 | 1409.82 | 705.91 | 706.04 |
| 133 | Ac-QSQQTF%r8NLWRNleL%QN-NH₂ | 871 | 2110.17 | 1056.09 | 1056.22 |
| 134 | Ac-LTF%r8HYwAQL%sA-NH₂ | 872 | 1670.92 | 836.46 | 836.58 |
| 135 | Ac-NlePRF%r8NYWRLL%QN-NH₂ | 873 | 1954.13 | 978.07 | 978.19 |
| 136 | Ac-NlePRF%r8NY6clWRLL%QN-NH₂ | 874 | 1988.09 | 995.05 | 995.68 |
| 137 | Ac-LTF%r8HY6clWAQL%S-NH₂ | 875 | 1633.84 | 817.92 | 817.93 |
| 138 | Ac-QS%QTF%StNLWRLL%s8QN-NH₂ | 876 | 2149.24 | 1075.62 | 1075.65 |
| 139 | Ac-LTF%r8HY6clWRQL%S-NH₂ | 877 | 1718.91 | 860.46 | 860.54 |
| 140 | Ac-QSQQTF%r8NL6clWRLL%QN-NH₂ | 878 | 2144.13 | 1073.07 | 1073.64 |
| 141 | Ac-%r8SQQTFS%LWRLLAibQN-NH₂ | 879 | 2040.15 | 1021.08 | 1021.13 |
| 142 | Ac-LTF%r8HYWAQL%S-NH₂ | 880 | 1599.88 | 800.94 | 801.09 |
| 143 | Ac-TSF%r8QYWNLL%P-NH₂ | 881 | 1602.88 | 802.44 | 802.58 |
| 147 | Ac-LTFEHYWAQLTS-NH₂ | 882 | 1535.74 | 768.87 | 769.5 |
| 152 | Ac-F$er8AY6clWEAc3cL$e-NH₂ | 883 | 1277.63 | 639.82 | 1278.71 |
| 153 | Ac-AFSr8AAWALASA-NH₂ | 884 | 1277.63 | 639.82 | 1277.84 |
| 154 | Ac-TF$r8AAWRLA$Q-NH₂ | 885 | 1395.80 | 698.90 | 699.04 |
| 155 | Pr-TF$r8AAWRLA$Q-NH₂ | 886 | 1409.82 | 705.91 | 706.04 |
| 156 | Ac-LTF$er8HYWAQL$eS-NH₂ | 887 | 1597.87 | 799.94 | 800.44 |
| 159 | Ac-CCPGCCBaQSQQTF$r8NLWRLL$QN-NH₂ | 888 | 2745.30 | 1373.65 | 1372.99 |
| 160 | Ac-CCPGCCBaQSQQTA$r8NLWRLL$QN-NH₂ | 889 | 2669.27 | 1335.64 | 1336.09 |
| 161 | Ac-CCPGCCBaNlePRF$r8NYWRLL$QN-NH₂ | 890 | 2589.26 | 1295.63 | 1296.2 |
| 162 | Ac-LTF$/r8HYWAQL$/S-NH₂ | 891 | 1625.90 | 813.95 | 814.18 |
| 163 | Ac-F%r8HY6clWRAc3cL%-NH₂ | 892 | 1372.72 | 687.36 | 687.59 |
| 164 | Ac-QTF%r8HWWSQL%S-NH₂ | 893 | 1653.87 | 827.94 | 827.94 |
| 165 | Ac-LTA$r8HYWRQL$S-NH₂ | 894 | 1606.90 | 804.45 | 804.66 |
| 166 | Ac-Q$r8QQTFSN$WRLLAibQN-NH₂ | 895 | 2080.12 | 1041.06 | 1041.61 |
| 167 | Ac-QSQQ$r8FSNLWR$LAibQN-NH₂ | 896 | 2066.11 | 1034.06 | 1034.58 |
| 168 | Ac-F$r8AYWEAc3cL$A-NH₂ | 897 | 1314.70 | 658.35 | 1315.88 |
| 169 | Ac-F$r8AYWEAc3cL$S-NH₂ | 898 | 1330.70 | 666.35 | 1331.87 |
| 170 | Ac-F$r8AYWEAc3cL$Q-NH₂ | 899 | 1371.72 | 686.86 | 1372.72 |
| 171 | Ac-F$r8AYWEAibL$S-NH₂ | 900 | 1332.71 | 667.36 | 1334.83 |
| 172 | Ac-F$r8AYWEAL$S-NH₂ | 901 | 1318.70 | 660.35 | 1319.73 |
| 173 | Ac-F$r8AYWEQL$S-NH₂ | 902 | 1375.72 | 688.86 | 1377.53 |
| 174 | Ac-F$r8HYWEQL$S-NH₂ | 903 | 1441.74 | 721.87 | 1443.48 |
| 175 | Ac-F$r8HYWAQL$S-NH₂ | 904 | 1383.73 | 692.87 | 1385.38 |
| 176 | Ac-F$r8HYWAAc3cL$S-NH₂ | 905 | 1338.71 | 670.36 | 1340.82 |
| 177 | Ac-F$r8HYWRAc3cL$S-NH₂ | 906 | 1423.78 | 712.89 | 713.04 |
| 178 | Ac-F$r8AYWEAc3cL#A-NH₂ | 907 | 1300.69 | 651.35 | 1302.78 |
| 179 | Ac-NlePTF%r8NYWRLL%QN-NH₂ | 908 | 1899.08 | 950.54 | 950.56 |
| 180 | Ac-TF$r8AAWRAL$Q-NH₂ | 909 | 1395.80 | 698.90 | 699.13 |
| 181 | Ac-TSF%r8HYWAQL%S-NH₂ | 910 | 1573.83 | 787.92 | 787.98 |
| 184 | Ac-F%r8AY6clWEAc3cL%A-NH₂ | 911 | 1350.68 | 676.34 | 676.91 |
| 185 | Ac-LTF$r8HYWAQI$S-NH₂ | 912 | 1597.87 | 799.94 | 800.07 |
| 186 | Ac-LTF$r8HYWAQNle$S-NH₂ | 913 | 1597.87 | 799.94 | 800.07 |
| 187 | Ac-LTF$r8HYWAQL$A-NH₂ | 914 | 1581.87 | 791.94 | 792.45 |
| 188 | Ac-LTF$r8HYWAQL$Abu-NH₂ | 915 | 1595.89 | 798.95 | 799.03 |
| 189 | Ac-LTF$r8HYWAbuQL$S-NH₂ | 916 | 1611.88 | 806.94 | 807.47 |
| 190 | Ac-LTF$er8AYWAQL$eS-NH₂ | 917 | 1531.84 | 766.92 | 766.96 |
| 191 | Ac-LAF$r8HYWAQL$S-NH₂ | 918 | 1567.86 | 784.93 | 785.49 |
| 192 | Ac-LAF$r8AYWAQL$S-NH₂ | 919 | 1501.83 | 751.92 | 752.01 |
| 193 | Ac-LTF$er8AYWAQL$eA-NH₂ | 920 | 1515.85 | 758.93 | 758.97 |
| 194 | Ac-LAF$r8AYWAQL$A-NH₂ | 921 | 1485.84 | 743.92 | 744.05 |
| 195 | Ac-LTF$r8NLWANleL$Q-NH₂ | 922 | 1550.92 | 776.46 | 776.61 |
| 196 | Ac-LTF$r8NLWANleL$A-NH₂ | 923 | 1493.90 | 747.95 | 1495.6 |
| 197 | Ac-LTF$r8ALWANleL$Q-NH₂ | 924 | 1507.92 | 754.96 | 755 |
| 198 | Ac-LAF$r8NLWANleL$Q-NH₂ | 925 | 1520.91 | 761.46 | 761.96 |
| 199 | Ac-LAF$r8ALWANleL$A-NH₂ | 926 | 1420.89 | 711.45 | 1421.74 |
| 200 | Ac-A$r8AYwEAc3cL$A-NH₂ | 927 | 1238.67 | 620.34 | 1239.65 |
| 201 | Ac-F$r8AYWEAc3cL$AA-NH₂ | 928 | 1385.74 | 693.87 | 1386.64 |
| 202 | Ac-F$r8AYWEAc3cL$Abu-NH₂ | 929 | 1328.72 | 665.36 | 1330.17 |
| 203 | Ac-F$r8AYWEAc3cL$Nle-NH₂ | 930 | 1356.75 | 679.38 | 1358.22 |
| 204 | Ac-F$r5AYWEAc3cL$s8A-NH₂ | 931 | 1314.70 | 658.35 | 1315.51 |
| 205 | Ac-F$AYWEAc3cL$r8A-NH₂ | 932 | 1314.70 | 658.35 | 1315.66 |
| 206 | Ac-F$r8AYWEAc3cI$A-NH₂ | 933 | 1314.70 | 658.35 | 1316.18 |
| 207 | Ac-F$r8AYWEAc3cNle$A-NH₂ | 934 | 1314.70 | 658.35 | 1315.66 |
| 208 | Ac-F$r8AYWEAmlL$A-NH₂ | 935 | 1358.76 | 680.38 | 1360.21 |
| 209 | Ac-F$r8AYWENleL$A-NH₂ | 936 | 1344.75 | 673.38 | 1345.71 |
| 210 | Ac-F$r8AYWQAc3cL$A-NH₂ | 937 | 1313.72 | 657.86 | 1314.7 |
| 211 | Ac-F$r8AYwAAc3cL$A-NH₂ | 938 | 1256.70 | 629.35 | 1257.56 |
| 212 | Ac-F$r8AYWAbuAc3cL$A-NH₂ | 939 | 1270.71 | 636.36 | 1272.14 |
| 213 | Ac-F$r8AYWNleAc3cL$A-NH₂ | 940 | 1298.74 | 650.37 | 1299.67 |
| 214 | Ac-F$r8AbuYWEAc3cL$A-NH₂ | 941 | 1328.72 | 665.36 | 1329.65 |
| 215 | Ac-F$r8NleYWEAc3cL$A-NH₂ | 942 | 1356.75 | 679.38 | 1358.66 |
| 216 | 5-FAM-BaLTFEHYWAQLTS-NH₂ | 943 | 1922.82 | 962.41 | 962.87 |
| 217 | 5-FAM-BaLTF%r8HYWAQL%S-NH₂ | 944 | 1986.96 | 994.48 | 994.97 |
| 218 | Ac-LTF$r8HYWAQhL$S-NH₂ | 945 | 1611.88 | 806.94 | 807 |
| 219 | Ac-LTF$r8HYWAQTle$S-NH₂ | 946 | 1597.87 | 799.94 | 799.97 |
| 220 | Ac-LTF$r8HYWAQAdm$S-NH₂ | 947 | 1675.91 | 838.96 | 839.09 |
| 221 | Ac-LTF$r8HYWAQhCha$S-NH₂ | 948 | 1651.91 | 826.96 | 826.98 |
| 222 | Ac-LTF$r8HYWAQCha$S-NH₂ | 949 | 1637.90 | 819.95 | 820.02 |
| 223 | Ac-LTF$r8HYWAc6cQL$S-NH₂ | 950 | 1651.91 | 826.96 | 826.98 |
| 224 | Ac-LTF$r8HYWAc5cQL$S-NH₂ | 951 | 1637.90 | 819.95 | 820.02 |
| 225 | Ac-LThF$r8HYWAQL$S-NH₂ | 952 | 1611.88 | 806.94 | 807 |
| 226 | Ac-LTIg1$r8HYWAQL$S-NH₂ | 953 | 1625.90 | 813.95 | 812.99 |
| 227 | Ac-LTF$r8HYwAQChg-S S-NH₂ | 954 | 1623.88 | 812.94 | 812.99 |
| 228 | Ac-LTF$r8HYWAQF$S-NH₂ | 955 | 1631.85 | 816.93 | 816.99 |
| 229 | Ac-LTF$r8HYWAQIgl$S-NH₂ | 956 | 1659.88 | 830.94 | 829.94 |
| 230 | Ac-LTF$r8HYWAQCba$S-NH₂ | 957 | 1609.87 | 805.94 | 805.96 |
| 231 | Ac-LTF$r8HYWAQCpg$S-NH₂ | 958 | 1609.87 | 805.94 | 805.96 |
| 232 | Ac-LTF$r8HhYWAQL$S-NH₂ | 959 | 1611.88 | 806.94 | 807 |
| 233 | Ac-F$r8AYWEAc3chL$A-NH₂ | 960 | 1328.72 | 665.36 | 665.43 |
| 234 | Ac-F$r8AYWEAc3cTle$A-NH₂ | 961 | 1314.70 | 658.35 | 1315.62 |
| 235 | Ac-F$r8AYWEAc3cAdm$A-NH₂ | 962 | 1392.75 | 697.38 | 697.47 |
| 236 | Ac-F$r8AYWEAc3chCha$A-NH₂ | 963 | 1368.75 | 685.38 | 685.34 |
| 237 | Ac-F$r8AYWEAc3cCha$A-NH₂ | 964 | 1354.73 | 678.37 | 678.38 |
| 238 | Ac-F$r8AYWEAc6cL$A-NH₂ | 965 | 1356.75 | 679.38 | 679.42 |
| 239 | Ac-F$r8AYWEAc5cL$A-NH₂ | 966 | 1342.73 | 672.37 | 672.46 |
| 240 | Ac-hF$r8AYWEAc3cL$A-NH₂ | 967 | 1328.72 | 665.36 | 665.43 |
| 241 | Ac-Ig1$r8AYWEAc3cL$A-NH₂ | 968 | 1342.73 | 672.37 | 671.5 |
| 243 | Ac-F$r8AYWEAc3cF$A-NH₂ | 969 | 1348.69 | 675.35 | 675.35 |
| 244 | Ac-F$r8AYWEAc3cIg1$A-NH₂ | 970 | 1376.72 | 689.36 | 688.37 |
| 245 | Ac-F$r8AYWEAc3cCba$A-NH₂ | 971 | 1326.70 | 664.35 | 664.47 |
| 246 | Ac-F$r8AYWEAc3cCpg$A-NH₂ | 972 | 1326.70 | 664.35 | 664.39 |
| 247 | Ac-F$r8AhYWEAc3cL$A-NH₂ | 973 | 1328.72 | 665.36 | 665.43 |
| 248 | Ac-F$r8AYWEAc3cL$Q-NH₂ | 974 | 1371.72 | 686.86 | 1372.87 |
| 249 | Ac-F$r8AYWEAibL$A-NH₂ | 975 | 1316.72 | 659.36 | 1318.18 |
| 250 | Ac-F$r8AYWEAL$A-NH₂ | 976 | 1302.70 | 652.35 | 1303.75 |
| 251 | Ac-LAF$r8AYWAAL$A-NH₂ | 977 | 1428.82 | 715.41 | 715.49 |
| 252 | Ac-LTF$r8HYWAAc3cL$S-NH₂ | 978 | 1552.84 | 777.42 | 777.5 |
| 253 | Ac-NleTF$r8HYWAQL$S-NH₂ | 979 | 1597.87 | 799.94 | 800.04 |
| 254 | Ac-VTF$r8HYWAQL$S-NH₂ | 980 | 1583.85 | 792.93 | 793.04 |
| 255 | Ac-FTF$r8HYWAQL$S-NH₂ | 981 | 1631.85 | 816.93 | 817.02 |
| 256 | Ac-WTF$r8HYWAQL$S-NH₂ | 982 | 1670.86 | 836.43 | 836.85 |
| 257 | Ac-RTF$r8HYWAQL$S-NH₂ | 983 | 1640.88 | 821.44 | 821.9 |
| 258 | Ac-KTF$r8HYWAQL$S-NH₂ | 984 | 1612.88 | 807.44 | 807.91 |
| 259 | Ac-LNleF$r8HYWAQL$S-NH₂ | 985 | 1609.90 | 805.95 | 806.43 |
| 260 | Ac-LVF$r8HYWAQL$S-NH₂ | 986 | 1595.89 | 798.95 | 798.93 |
| 261 | Ac-LFF$r8HYWAQL$S-NH₂ | 987 | 1643.89 | 822.95 | 823.38 |
| 262 | Ac-LWF$r8HYWAQL$S-NH₂ | 988 | 1682.90 | 842.45 | 842.55 |
| 263 | Ac-LRF$r8HYWAQL$S-NH₂ | 989 | 1652.92 | 827.46 | 827.52 |
| 264 | Ac-LKF$r8HYWAQL$S-NH₂ | 990 | 1624.91 | 813.46 | 813.51 |
| 265 | Ac-LTF$r8NleYWAQL$S-NH₂ | 991 | 1573.89 | 787.95 | 788.05 |
| 266 | Ac-LTF$r8VYWAQL$S-NH₂ | 992 | 1559.88 | 780.94 | 780.98 |
| 267 | Ac-LTF$r8FYWAQL$S-NH₂ | 993 | 1607.88 | 804.94 | 805.32 |
| 268 | Ac-LTF$r8WYWAQL$S-NH₂ | 994 | 1646.89 | 824.45 | 824.86 |
| 269 | Ac-LTF$r8RYWAQL$S-NH₂ | 995 | 1616.91 | 809.46 | 809.51 |
| 270 | Ac-LTF$r8KYWAQL$S-NH₂ | 996 | 1588.90 | 795.45 | 795.48 |
| 271 | Ac-LTF$r8HNleWAQL$S-NH₂ | 997 | 1547.89 | 774.95 | 774.98 |
| 272 | Ac-LTF$r8HVWAQL$S-NH₂ | 998 | 1533.87 | 767.94 | 767.95 |
| 273 | Ac-LTF$r8HFWAQL$S-NH₂ | 999 | 1581.87 | 791.94 | 792.3 |
| 274 | Ac-LTF$r8HWWAQL$S-NH₂ | 1000 | 1620.88 | 811.44 | 811.54 |
| 275 | Ac-LTF$r8HRWAQL$S-NH₂ | 1001 | 1590.90 | 796.45 | 796.52 |
| 276 | Ac-LTF$r8HKWAQL$S-NH₂ | 1002 | 1562.90 | 782.45 | 782.53 |
| 277 | Ac-LTF$r8HYWNleQL$S-NH₂ | 1003 | 1639.91 | 820.96 | 820.98 |
| 278 | Ac-LTF$r8HYWVQL$S-NH₂ | 1004 | 1625.90 | 813.95 | 814.03 |
| 279 | Ac-LTF$r8HYWFQL$S-NH₂ | 1005 | 1673.90 | 837.95 | 838.03 |
| 280 | Ac-LTF$r8HYWWQL$S-NH₂ | 1006 | 1712.91 | 857.46 | 857.5 |
| 281 | Ac-LTF$r8HYWKQL$S-NH₂ | 1007 | 1654.92 | 828.46 | 828.49 |
| 282 | Ac-LTF$r8HYWANleL$S-NH₂ | 1008 | 1582.89 | 792.45 | 792.52 |
| 283 | Ac-LTF$r8HYWAVL$S-NH₂ | 1009 | 1568.88 | 785.44 | 785.49 |
| 284 | Ac-LTF$r8HYWAFL$S-NH₂ | 1010 | 1616.88 | 809.44 | 809.47 |
| 285 | Ac-LTF$r8HYWAWL$S-NH₂ | 1011 | 1655.89 | 828.95 | 829 |
| 286 | Ac-LTF$r8HYWARL$S-NH₂ | 1012 | 1625.91 | 813.96 | 813.98 |
| 287 | Ac-LTF$r8HYWAQL$Nle-NH₂ | 1013 | 1623.92 | 812.96 | 813.39 |
| 288 | Ac-LTF$r8HYWAQL$V-NH₂ | 1014 | 1609.90 | 805.95 | 805.99 |
| 289 | Ac-LTF$r8HYWAQL$F-NH₂ | 1015 | 1657.90 | 829.95 | 830.26 |
| 290 | Ac-LTF$r8HYWAQL$W-NH₂ | 1016 | 1696.91 | 849.46 | 849.5 |
| 291 | Ac-LTF$r8HYWAQL$R-NH₂ | 1017 | 1666.94 | 834.47 | 834.56 |
| 292 | Ac-LTF$r8HYWAQL$K-NH₂ | 1018 | 1638.93 | 820.47 | 820.49 |
| 293 | Ac-Q$r8QQTFSN$wRLLAibQN-NH₂ | 1019 | 2080.12 | 1041.06 | 1041.54 |
| 294 | Ac-QSQQ$r8FSNLWR$LAibQN-NH₂ | 1020 | 2066.11 | 1034.06 | 1034.58 |
| 295 | Ac-LT2Pal$r8HYWAQL$S-NH₂ | 1021 | 1598.86 | 800.43 | 800.49 |
| 296 | Ac-LT3Pal$r8HYWAQL$S-NH₂ | 1022 | 1598.86 | 800.43 | 800.49 |
| 297 | Ac-LT4Pal$r8HYWAQL$S-NH₂ | 1023 | 1598.86 | 800.43 | 800.49 |
| 298 | Ac-LTF2CF3$r8HYWAQL$S-NH₂ | 1024 | 1665.85 | 833.93 | 834.01 |
| 299 | Ac-LTF2CN$r8HYWAQL$S-NH₂ | 1025 | 1622.86 | 812.43 | 812.47 |
| 300 | Ac-LTF2Me$r8HYWAQL$S-NH₂ | 1026 | 1611.88 | 806.94 | 807 |
| 301 | Ac-LTF3Cl$r8HYWAQL$S-NH₂ | 1027 | 1631.83 | 816.92 | 816.99 |
| 302 | Ac-LTF4CF3$r8HYwAQL$S-NH₂ | 1028 | 1665.85 | 833.93 | 833.94 |
| 303 | Ac-LTF4tBu$r8HYWAQL$S-NH₂ | 1029 | 1653.93 | 827.97 | 828.02 |
| 304 | Ac-LTF5F$r8HYWAQL$S-NH₂ | 1030 | 1687.82 | 844.91 | 844.96 |
| 305 | Ac-LTF$r8HY3BthAAQL$S-NH₂ | 1031 | 1614.83 | 808.42 | 808.48 |
| 306 | Ac-LTF2Br$r8HYWAQL$S-NH₂ | 1032 | 1675.78 | 838.89 | 838.97 |
| 307 | Ac-LTF4Br$r8HYWAQL$S-NH₂ | 1033 | 1675.78 | 838.89 | 839.86 |
| 308 | Ac-LTF2Cl$r8HYWAQL$S-NH₂ | 1034 | 1631.83 | 816.92 | 816.99 |
| 309 | Ac-LTF4Cl$r8HYWAQL$S-NH₂ | 1035 | 1631.83 | 816.92 | 817.36 |
| 310 | Ac-LTF3CN$r8HYWAQL$S-NH₂ | 1036 | 1622.86 | 812.43 | 812.47 |
| 311 | Ac-LTF4CN$r8HYWAQL$S-NH₂ | 1037 | 1622.86 | 812.43 | 812.47 |
| 312 | Ac-LTF34Cl2$r8HYWAQL$S-NH₂ | 1038 | 1665.79 | 833.90 | 833.94 |
| 313 | Ac-LTF34F2$r8HYWAQL$S-NH₂ | 1039 | 1633.85 | 817.93 | 817.95 |
| 314 | Ac-LTF35F2$r8HYWAQL$S-NH₂ | 1040 | 1633.85 | 817.93 | 817.95 |
| 315 | Ac-LTDip$r8HYWAQL$S-NH₂ | 1041 | 1673.90 | 837.95 | 838.01 |
| 316 | Ac-LTF2F$r8HYWAQL$S-NH₂ | 1042 | 1615.86 | 808.93 | 809 |
| 317 | Ac-LTF3F$r8HYWAQL$S-NH₂ | 1043 | 1615.86 | 808.93 | 809 |
| 318 | Ac-LTF4F$r8HYWAQL$S-NH₂ | 1044 | 1615.86 | 808.93 | 809 |
| 319 | Ac-LTF4I$r8HYWAQL$S-NH₂ | 1045 | 1723.76 | 862.88 | 862.94 |
| 320 | Ac-LTF3Me$r8HYWAQL$S-NH₂ | 1046 | 1611.88 | 806.94 | 807.07 |
| 321 | Ac-LTF4Me$r8HYWAQL$S-NH₂ | 1047 | 1611.88 | 806.94 | 807 |
| 322 | Ac-LT1Nal$r8HYWAQL$S-NH₂ | 1048 | 1647.88 | 824.94 | 824.98 |
| 323 | Ac-LT2Nal$r8HYWAQL$S-NH₂ | 1049 | 1647.88 | 824.94 | 825.06 |
| 324 | Ac-LTF3CF3$r8HYWAQL$S-NH₂ | 1050 | 1665.85 | 833.93 | 834.01 |
| 325 | Ac-LTF4NO2$r8HYWAQL$S-NH₂ | 1051 | 1642.85 | 822.43 | 822.46 |
| 326 | Ac-LTF3NO2$r8HYWAQL$S-NH₂ | 1052 | 1642.85 | 822.43 | 822.46 |
| 327 | Ac-LTF$r82ThiYWAQL$S-NH₂ | 1053 | 1613.83 | 807.92 | 807.96 |
| 328 | Ac-LTF$r8HBipWAQL$S-NH₂ | 1054 | 1657.90 | 829.95 | 830.01 |
| 329 | Ac-LTF$r8HF4tBuWAQL$S-NH₂ | 1055 | 1637.93 | 819.97 | 820.02 |
| 330 | Ac-LTF$r8HF4CF3WAQL$S-NH₂ | 1056 | 1649.86 | 825.93 | 826.02 |
| 331 | Ac-LTF$r8HF4C1WAQL$S-NH₂ | 1057 | 1615.83 | 808.92 | 809.37 |
| 332 | Ac-LTF$r8HF4MeWAQL$S-NH₂ | 1058 | 1595.89 | 798.95 | 799.01 |
| 333 | Ac-LTF$r8HF4BrWAQL$S-NH₂ | 1059 | 1659.78 | 830.89 | 830.98 |
| 334 | Ac-LTF$r8HF4CNWAQL$S-NH₂ | 1060 | 1606.87 | 804.44 | 804.56 |
| 335 | Ac-LTF$r8HF4NO2WAQL$S-NH₂ | 1061 | 1626.86 | 814.43 | 814.55 |
| 336 | Ac-LTF$r8H1NalWAQL$S-NH₂ | 1062 | 1631.89 | 816.95 | 817.06 |
| 337 | Ac-LTF$r8H2NalWAQL$S-NH₂ | 1063 | 1631.89 | 816.95 | 816.99 |
| 338 | Ac-LTF$r8HWAQL$S-NH₂ | 1064 | 1434.80 | 718.40 | 718.49 |
| 339 | Ac-LTF$r8HY1NalAQL$S-NH₂ | 1065 | 1608.87 | 805.44 | 805.52 |
| 340 | Ac-LTF$r8HY2NalAQL$S-NH₂ | 1066 | 1608.87 | 805.44 | 805.52 |
| 341 | Ac-LTF$r8HYWAQI$S-NH₂ | 1067 | 1597.87 | 799.94 | 800.07 |
| 342 | Ac-LTF$r8HYWAQNle$S-NH₂ | 1068 | 1597.87 | 799.94 | 800.44 |
| 343 | Ac-LTF$er8HYWAQL$eA-NH₂ | 1069 | 1581.87 | 791.94 | 791.98 |
| 344 | Ac-LTF$r8HYWAQL$Abu-NH₂ | 1070 | 1595.89 | 798.95 | 799.03 |
| 345 | Ac-LTF$r8HYWAbuQL$S-NH₂ | 1071 | 1611.88 | 806.94 | 804.47 |
| 346 | Ac-LAF$r8HYWAQL$S-NH₂ | 1072 | 1567.86 | 784.93 | 785.49 |
| 347 | Ac-LTF$r8NLWANleL$Q-NH₂ | 1073 | 1550.92 | 776.46 | 777.5 |
| 348 | Ac-LTF$r8ALWANleL$Q-NH₂ | 1074 | 1507.92 | 754.96 | 755.52 |
| 349 | Ac-LAF$r8NLWANleL$Q-NH₂ | 1075 | 1520.91 | 761.46 | 762.48 |
| 350 | Ac-F$r8AYWAAc3cL$A-NH₂ | 1076 | 1256.70 | 629.35 | 1257.56 |
| 351 | Ac-LTF$r8AYWAAL$S-NH₂ | 1077 | 1474.82 | 738.41 | 738.55 |
| 352 | Ac-LVF$r8AYWAQL$S-NH₂ | 1078 | 1529.87 | 765.94 | 766 |
| 353 | Ac-LTF$r8AYWAbuQL$S-NH₂ | 1079 | 1545.86 | 773.93 | 773.92 |
| 354 | Ac-LTF$r8AYWNleQL$S-NH₂ | 1080 | 1573.89 | 787.95 | 788.17 |
| 355 | Ac-LTF$r8AbuYWAQL$S-NH₂ | 1081 | 1545.86 | 773.93 | 773.99 |
| 356 | Ac-LTF$r8AYWHQL$S-NH₂ | 1082 | 1597.87 | 799.94 | 799.97 |
| 357 | Ac-LTF$r8AYWKQL$S-NH₂ | 1083 | 1588.90 | 795.45 | 795.53 |
| 358 | Ac-LTF$r8AYWOQL$S-NH₂ | 1084 | 1574.89 | 788.45 | 788.5 |
| 359 | Ac-LTF$r8AYWRQL$S-NH₂ | 1085 | 1616.91 | 809.46 | 809.51 |
| 360 | Ac-LTF$r8AYWSQL$S-NH₂ | 1086 | 1547.84 | 774.92 | 774.96 |
| 361 | Ac-LTF$r8AYWRAL$S-NH₂ | 1087 | 1559.89 | 780.95 | 780.95 |
| 362 | Ac-LTF$r8AYwRQL$A-NH₂ | 1088 | 1600.91 | 801.46 | 801.52 |
| 363 | Ac-LTF$r8AYWRAL$A-NH₂ | 1089 | 1543.89 | 772.95 | 773.03 |
| 364 | Ac-LTF$r5HYWAQL$s8S-NH₂ | 1090 | 1597.87 | 799.94 | 799.97 |
| 365 | Ac-LTF$HYWAQL$r8S-NH₂ | 1091 | 1597.87 | 799.94 | 799.97 |
| 366 | Ac-LTF$r8HYWAAL$S-NH₂ | 1092 | 1540.84 | 771.42 | 771.48 |
| 367 | Ac-LTF$r8HYWAAbuL$S-NH₂ | 1093 | 1554.86 | 778.43 | 778.51 |
| 368 | Ac-LTF$r8HYWALL$S-NH₂ | 1094 | 1582.89 | 792.45 | 792.49 |
| 369 | Ac-F$r8AYWHAL$A-NH₂ | 1095 | 1310.72 | 656.36 | 656.4 |
| 370 | Ac-F$r8AYWAAL$A-NH₂ | 1096 | 1244.70 | 623.35 | 1245.61 |
| 371 | Ac-F$r8AYWSAL$A-NH₂ | 1097 | 1260.69 | 631.35 | 1261.6 |
| 372 | Ac-F$r8AYWRAL$A-NH₂ | 1098 | 1329.76 | 665.88 | 1330.72 |
| 373 | Ac-F$r8AYWKAL$A-NH₂ | 1099 | 1301.75 | 651.88 | 1302.67 |
| 374 | Ac-F$r8AYWOAL$A-NH₂ | 1100 | 1287.74 | 644.87 | 1289.13 |
| 375 | Ac-F$r8VYWEAc3cL$A-NH₂ | 1101 | 1342.73 | 672.37 | 1343.67 |
| 376 | Ac-F$r8FYWEAc3cL$A-NH₂ | 1102 | 1390.73 | 696.37 | 1392.14 |
| 377 | Ac-F$r8WYWEAc3cL$A-NH₂ | 1103 | 1429.74 | 715.87 | 1431.44 |
| 378 | Ac-F$r8RYWEAc3cL$A-NH₂ | 1104 | 1399.77 | 700.89 | 700.95 |
| 379 | Ac-F$r8KYWEAc3cL$A-NH₂ | 1105 | 1371.76 | 686.88 | 686.97 |
| 380 | Ac-F$r8ANleWEAc3cL$A-NH₂ | 1106 | 1264.72 | 633.36 | 1265.59 |
| 381 | Ac-F$r8AVWEAc3cL$A-NH₂ | 1107 | 1250.71 | 626.36 | 1252.2 |
| 382 | Ac-F$r8AFWEAc3cL$A-NH₂ | 1108 | 1298.71 | 650.36 | 1299.64 |
| 383 | Ac-F$r8AWWEAc3cL$A-NH₂ | 1109 | 1337.72 | 669.86 | 1338.64 |
| 384 | Ac-F$r8ARWEAc3cL$A-NH₂ | 1110 | 1307.74 | 654.87 | 655 |
| 385 | Ac-F$r8AKWEAc3cL$A-NH₂ | 1111 | 1279.73 | 640.87 | 641.01 |
| 386 | Ac-F$r8AYWVAc3cL$A-NH₂ | 1112 | 1284.73 | 643.37 | 643.38 |
| 387 | Ac-F$r8AYWFAc3cL$A-NH₂ | 1113 | 1332.73 | 667.37 | 667.43 |
| 388 | Ac-F$r8AYWWAc3cL$A-NH₂ | 1114 | 1371.74 | 686.87 | 686.97 |
| 389 | Ac-F$r8AYWRAc3cL$A-NH₂ | 1115 | 1341.76 | 671.88 | 671.94 |
| 390 | Ac-F$r8AYWKAc3cL$A-NH₂ | 1116 | 1313.75 | 657.88 | 657.88 |
| 391 | Ac-F$r8AYWEVL$A-NH₂ | 1117 | 1330.73 | 666.37 | 666.47 |
| 392 | Ac-F$r8AYWEFL$A-NH₂ | 1118 | 1378.73 | 690.37 | 690.44 |
| 393 | Ac-F$r8AYWEWL$A-NH₂ | 1119 | 1417.74 | 709.87 | 709.91 |
| 394 | Ac-F$r8AYWERL$A-NH₂ | 1120 | 1387.77 | 694.89 | 1388.66 |
| 395 | Ac-F$r8AYWEKL$A-NH₂ | 1121 | 1359.76 | 680.88 | 1361.21 |
| 396 | Ac-F$r8AYWEAc3cL$V-NH₂ | 1122 | 1342.73 | 672.37 | 1343.59 |
| 397 | Ac-F$r8AYWEAc3cL$F-NH₂ | 1123 | 1390.73 | 696.37 | 1392.58 |
| 398 | Ac-F$r8AYWEAc3cL$W-NH₂ | 1124 | 1429.74 | 715.87 | 1431.29 |
| 399 | Ac-F$r8AYWEAc3cL$R-NH₂ | 1125 | 1399.77 | 700.89 | 700.95 |
| 400 | Ac-F$r8AYWEAc3cL$K-NH₂ | 1126 | 1371.76 | 686.88 | 686.97 |
| 401 | Ac-F$r8AYWEAc3cL$AV-NH₂ | 1127 | 1413.77 | 707.89 | 707.91 |
| 402 | Ac-F$r8AYWEAc3cL$AF-NH₂ | 1128 | 1461.77 | 731.89 | 731.96 |
| 403 | Ac-F$r8AYWEAc3cL$Aw-NH₂ | 1129 | 1500.78 | 751.39 | 751.5 |
| 404 | Ac-F$r8AYWEAc3cL$AR-NH₂ | 1130 | 1470.80 | 736.40 | 736.47 |
| 405 | Ac-F$r8AYWEAc3cL$AK-NH₂ | 1131 | 1442.80 | 722.40 | 722.41 |
| 406 | Ac-F$r8AYWEAc3cL$AH-NH₂ | 1132 | 1451.76 | 726.88 | 726.93 |
| 407 | Ac-LTF2NO2$r8HYWAQL$S-NH₂ | 1133 | 1642.85 | 822.43 | 822.54 |
| 408 | Ac-LTA$r8HYAAQL$S-NH₂ | 1134 | 1406.79 | 704.40 | 704.5 |
| 409 | Ac-LTF$r8HYAAQL$S-NH₂ | 1135 | 1482.82 | 742.41 | 742.47 |
| 410 | Ac-QSQQTF$r8NLWALL$AN-NH₂ | 1136 | 1966.07 | 984.04 | 984.38 |
| 411 | Ac-QAibQQTF$r8NLWALL$AN-NH₂ | 1137 | 1964.09 | 983.05 | 983.42 |
| 412 | Ac-QAibQQTF$r8ALWALL$AN-NH₂ | 1138 | 1921.08 | 961.54 | 961.59 |
| 413 | Ac-AAAATF$r8AAWAAL$AA-NH₂ | 1139 | 1608.90 | 805.45 | 805.52 |
| 414 | Ac-F$r8AAWRAL$Q-NH₂ | 1140 | 1294.76 | 648.38 | 648.48 |
| 415 | Ac-TF$r8AAWAAL$Q-NH₂ | 1141 | 1310.74 | 656.37 | 1311.62 |
| 416 | Ac-TF$r8AAWRAL$A-NH₂ | 1142 | 1338.78 | 670.39 | 670.46 |
| 417 | Ac-VF$r8AAWRAL$Q-NH₂ | 1143 | 1393.82 | 697.91 | 697.99 |
| 418 | Ac-AF$r8AAWAAL$A-NH₂ | 1144 | 1223.71 | 612.86 | 1224.67 |
| 420 | Ac-TF$r8AAWKAL$Q-NH₂ | 1145 | 1367.80 | 684.90 | 684.97 |
| 421 | Ac-TF$r8AAWOAL$Q-NH₂ | 1146 | 1353.78 | 677.89 | 678.01 |
| 422 | Ac-TF$r8AAWSAL$Q-NH₂ | 1147 | 1326.73 | 664.37 | 664.47 |
| 423 | Ac-LTF$r8AAWRAL$Q-NH₂ | 1148 | 1508.89 | 755.45 | 755.49 |
| 424 | Ac-F$r8AYWAQL$A-NH₂ | 1149 | 1301.72 | 651.86 | 651.96 |
| 425 | Ac-F$r8AWWAAL$A-NH₂ | 1150 | 1267.71 | 634.86 | 634.87 |
| 426 | Ac-F$r8AWWAQL$A-NH₂ | 1151 | 1324.73 | 663.37 | 663.43 |
| 427 | Ac-F$r8AYWEAL$-NH₂ | 1152 | 1231.66 | 616.83 | 1232.93 |
| 428 | Ac-F$r8AYWAAL$-NH₂ | 1153 | 1173.66 | 587.83 | 1175.09 |
| 429 | Ac-F$r8AYWKAL$-NH₂ | 1154 | 1230.72 | 616.36 | 616.44 |
| 430 | Ac-F$r8AYWOAL$-NH₂ | 1155 | 1216.70 | 609.35 | 609.48 |
| 431 | Ac-F$r8AYWQAL$-NH₂ | 1156 | 1230.68 | 616.34 | 616.44 |
| 432 | Ac-F$r8AYWAQL$-NH₂ | 1157 | 1230.68 | 616.34 | 616.37 |
| 433 | Ac-F$r8HYWDQL$S-NH₂ | 1158 | 1427.72 | 714.86 | 714.86 |
| 434 | Ac-F$r8HFWEQL$S-NH₂ | 1159 | 1425.74 | 713.87 | 713.98 |
| 435 | Ac-F$r8AYWHQL$S-NH₂ | 1160 | 1383.73 | 692.87 | 692.96 |
| 436 | Ac-F$r8AYWKQL$S-NH₂ | 1161 | 1374.77 | 688.39 | 688.45 |
| 437 | Ac-F$r8AYWOQL$S-NH₂ | 1162 | 1360.75 | 681.38 | 681.49 |
| 438 | Ac-F$r8HYWSQL$S-NH₂ | 1163 | 1399.73 | 700.87 | 700.95 |
| 439 | Ac-F$r8HWWEQL$S-NH₂ | 1164 | 1464.76 | 733.38 | 733.44 |
| 440 | Ac-F$r8HWWAQL$S-NH₂ | 1165 | 1406.75 | 704.38 | 704.43 |
| 441 | Ac-F$r8AWWHQL$S-NH₂ | 1166 | 1406.75 | 704.38 | 704.43 |
| 442 | Ac-F$r8AWWKQL$S-NH₂ | 1167 | 1397.79 | 699.90 | 699.92 |
| 443 | Ac-F$r8AWWOQL$S-NH₂ | 1168 | 1383.77 | 692.89 | 692.96 |
| 444 | Ac-F$r8HWWSQL$S-NH₂ | 1169 | 1422.75 | 712.38 | 712.42 |
| 445 | Ac-LTF$r8NYWANleL$Q-NH₂ | 1170 | 1600.90 | 801.45 | 801.52 |
| 446 | Ac-LTF$r8NLWAQL$Q-NH₂ | 1171 | 1565.90 | 783.95 | 784.06 |
| 447 | Ac-LTF$r8NYWANleL$A-NH₂ | 1172 | 1543.88 | 772.94 | 773.03 |
| 448 | Ac-LTF$r8NLWAQL$A-NH₂ | 1173 | 1508.88 | 755.44 | 755.49 |
| 449 | Ac-LTF$r8AYWANleL$Q-NH₂ | 1174 | 1557.90 | 779.95 | 780.06 |
| 450 | Ac-LTF$r8ALWAQL$Q-NH₂ | 1175 | 1522.89 | 762.45 | 762.45 |
| 451 | Ac-LAF$r8NYWANleL$Q-NH₂ | 1176 | 1570.89 | 786.45 | 786.5 |
| 452 | Ac-LAF$r8NLWAQL$Q-NH₂ | 1177 | 1535.89 | 768.95 | 769.03 |
| 453 | Ac-LAF$r8AYWANleL$A-NH₂ | 1178 | 1470.86 | 736.43 | 736.47 |
| 454 | Ac-LAF$r8ALWAQL$A-NH₂ | 1179 | 1435.86 | 718.93 | 719.01 |
| 455 | Ac-LAF$r8AYWAAL$A-NH₂ | 1180 | 1428.82 | 715.41 | 715.41 |
| 456 | Ac-F$r8AYWEAc3cL$AAib-NH₂ | 1181 | 1399.75 | 700.88 | 700.95 |
| 457 | Ac-F$r8AYWAQL$AA-NH₂ | 1182 | 1372.75 | 687.38 | 687.78 |
| 458 | Ac-F$r8AYWAAc3cL$AA-NH₂ | 1183 | 1327.73 | 664.87 | 664.84 |
| 459 | Ac-F$r8AYWSAc3cL$AA-NH₂ | 1184 | 1343.73 | 672.87 | 672.9 |
| 460 | Ac-F$r8AYWEAc3cL$AS-NH₂ | 1185 | 1401.73 | 701.87 | 701.84 |
| 461 | Ac-F$r8AYWEAc3cL$AT-NH₂ | 1186 | 1415.75 | 708.88 | 708.87 |
| 462 | Ac-F$r8AYWEAc3cL$AL-NH₂ | 1187 | 1427.79 | 714.90 | 714.94 |
| 463 | Ac-F$r8AYWEAc3cL$AQ-NH₂ | 1188 | 1442.76 | 722.38 | 722.41 |
| 464 | Ac-F$r8AFWEAc3cL$AA-NH₂ | 1189 | 1369.74 | 685.87 | 685.93 |
| 465 | Ac-F$r8AWWEAc3cL$AA-NH₂ | 1190 | 1408.75 | 705.38 | 705.39 |
| 466 | Ac-F$r8AYWEAc3cL$SA-NH₂ | 1191 | 1401.73 | 701.87 | 701.99 |
| 467 | Ac-F$r8AYWEAL$AA-NH₂ | 1192 | 1373.74 | 687.87 | 687.93 |
| 468 | Ac-F$r8AYWENleL$AA-NH₂ | 1193 | 1415.79 | 708.90 | 708.94 |
| 469 | Ac-F$r8AYWEAc3cL$AbuA-NH₂ | 1194 | 1399.75 | 700.88 | 700.95 |
| 470 | Ac-F$r8AYWEAc3cL$NleA-NH₂ | 1195 | 1427.79 | 714.90 | 714.86 |
| 471 | Ac-F$r8AYWEAibL$NleA-NH₂ | 1196 | 1429.80 | 715.90 | 715.97 |
| 472 | Ac-F$r8AYWEAL$NleA-NH₂ | 1197 | 1415.79 | 708.90 | 708.94 |
| 473 | Ac-F$r8AYWENleL$NleA-NH₂ | 1198 | 1457.83 | 729.92 | 729.96 |
| 474 | Ac-F$r8AYWEAibL$Abu-NH₂ | 1199 | 1330.73 | 666.37 | 666.39 |
| 475 | Ac-F$r8AYWENleL$Abu-NH₂ | 1200 | 1358.76 | 680.38 | 680.39 |
| 476 | Ac-F$r8AYWEAL$Abu-NH₂ | 1201 | 1316.72 | 659.36 | 659.36 |
| 477 | Ac-LTF$r8AFWAQL$S-NH₂ | 1202 | 1515.85 | 758.93 | 759.12 |
| 478 | Ac-LTF$r8AWWAQL$S-NH₂ | 1203 | 1554.86 | 778.43 | 778.51 |
| 479 | Ac-LTF$r8AYWAQI$S-NH₂ | 1204 | 1531.84 | 766.92 | 766.96 |
| 480 | Ac-LTF$r8AYWAQNle$S-NH₂ | 1205 | 1531.84 | 766.92 | 766.96 |
| 481 | Ac-LTF$r8AYWAQL$SA-NH₂ | 1206 | 1602.88 | 802.44 | 802.48 |
| 482 | Ac-LTF$r8AWWAQL$A-NH₂ | 1207 | 1538.87 | 770.44 | 770.89 |
| 483 | Ac-LTFSr8AYWAQISA-NH₂ | 1208 | 1515.85 | 758.93 | 759.42 |
| 484 | Ac-LTF$r8AYWAQNle$A-NH₂ | 1209 | 1515.85 | 758.93 | 759.42 |
| 485 | Ac-LTFSr8AYWAQLSAA-NH₂ | 1210 | 1586.89 | 794.45 | 794.94 |
| 486 | Ac-LTF$r8HWWAQL$S-NH₂ | 1211 | 1620.88 | 811.44 | 811.47 |
| 487 | Ac-LTFSr8HRWAQLSS-NH₂ | 1212 | 1590.90 | 796.45 | 796.52 |
| 488 | Ac-LTF$r8HKWAQL$S-NH₂ | 1213 | 1562.90 | 782.45 | 782.53 |
| 489 | Ac-LTFSr8HYWAQLSW-NH₂ | 1214 | 1696.91 | 849.46 | 849.5 |
| 491 | Ac-F$r8AYWAbuAL$A-NH₂ | 1215 | 1258.71 | 630.36 | 630.5 |
| 492 | Ac-FSr8AbuYWEALSA-NH₂ | 1216 | 1316.72 | 659.36 | 659.51 |
| 493 | Ac-NlePRF%r8NYWRLL%QN-NH₂ | 1217 | 1954.13 | 978.07 | 978.54 |
| 494 | Ac-TSF%r8HYWAQL%S-NH₂ | 1218 | 1573.83 | 787.92 | 787.98 |
| 495 | Ac-LTF%r8AYWAQL%S-NH₂ | 1219 | 1533.86 | 767.93 | 768 |
| 496 | Ac-HTFSr8HYWAQLSS-NH₂ | 1220 | 1621.84 | 811.92 | 811.96 |
| 497 | Ac-LHFSr8HYWAQLSS-NH₂ | 1221 | 1633.88 | 817.94 | 818.02 |
| 498 | Ac-LTFSr8HHWAQLSS-NH₂ | 1222 | 1571.86 | 786.93 | 786.94 |
| 499 | Ac-LTFSr8HYWHQLSS-NH₂ | 1223 | 1663.89 | 832.95 | 832.38 |
| 500 | Ac-LTFSr8HYWAHLSS-NH₂ | 1224 | 1606.87 | 804.44 | 804.48 |
| 501 | Ac-LTFSr8HYWAQLSH-NH₂ | 1225 | 1647.89 | 824.95 | 824.98 |
| 502 | Ac-LTF$r8HYWAQL$S-NHPr | 1226 | 1639.91 | 820.96 | 820.98 |
| 503 | Ac-LTF$r8HYWAQL$S-NHsBu | 1227 | 1653.93 | 827.97 | 828.02 |
| 504 | Ac-LTF$r8HYWAQL$S-NHiBu | 1228 | 1653.93 | 827.97 | 828.02 |
| 505 | Ac-LTF$r8HYWAQL$S-NHBn | 1229 | 1687.91 | 844.96 | 844.44 |
| 506 | Ac-LTF$r8HYWAQL$S-NHPe | 1230 | 1700.92 | 851.46 | 851.99 |
| 507 | Ac-LTF$r8HYWAQL$S-NHChx | 1231 | 1679.94 | 840.97 | 841.04 |
| 508 | Ac-ETFSr8AYWAQLSS-NH₂ | 1232 | 1547.80 | 774.90 | 774.96 |
| 509 | Ac-STFSr8AYWAQLSS-NH₂ | 1233 | 1505.79 | 753.90 | 753.94 |
| 510 | Ac-LEFSr8AYWAQLSS-NH₂ | 1234 | 1559.84 | 780.92 | 781.25 |
| 511 | Ac-LSFSr8AYWAQLSS-NH₂ | 1235 | 1517.83 | 759.92 | 759.93 |
| 512 | Ac-LTFSr8EYWAQLSS-NH₂ | 1236 | 1589.85 | 795.93 | 795.97 |
| 513 | Ac-LTFSr8SYWAQLSS-NH₂ | 1237 | 1547.84 | 774.92 | 774.96 |
| 514 | Ac-LTFSr8AYWEQLSS-NH₂ | 1238 | 1589.85 | 795.93 | 795.9 |
| 515 | Ac-LTFSr8AYWAELSS-NH₂ | 1239 | 1532.83 | 767.42 | 766.96 |
| 516 | Ac-LTFSr8AYWASLSS-NH₂ | 1240 | 1490.82 | 746.41 | 746.46 |
| 517 | Ac-LTFSr8AYWAQLSE-NH₂ | 1241 | 1573.85 | 787.93 | 787.98 |
| 518 | Ac-LTF2CNSr8HYWAQLSS-NH₂ | 1242 | 1622.86 | 812.43 | 812.47 |
| 519 | Ac-LTF3ClSr8HYWAQLSS-NH₂ | 1243 | 1631.83 | 816.92 | 816.99 |
| 520 | Ac-LTDipSr8HYWAQLSS-NH₂ | 1244 | 1673.90 | 837.95 | 838.01 |
| 521 | Ac-LTFSr8HYWAQTle$S-NH₂ | 1245 | 1597.87 | 799.94 | 800.04 |
| 522 | Ac-F$r8AY6clWEAL$A-NH₂ | 1246 | 1336.66 | 669.33 | 1338.56 |
| 523 | Ac-F$r8AYdl6brWEAL$A-NH₂ | 1247 | 1380.61 | 691.31 | 692.2 |
| 524 | Ac-F$r8AYdl6fWEAL$A-NH₂ | 1248 | 1320.69 | 661.35 | 1321.61 |
| 525 | Ac-F$r8AYdl4mWEAL$A-NH₂ | 1249 | 1316.72 | 659.36 | 659.36 |
| 526 | Ac-F$r8AYdl5clWEAL$A-NH₂ | 1250 | 1336.66 | 669.33 | 669.35 |
| 527 | Ac-F$r8AYdl7mWEAL$A-NH₂ | 1251 | 1316.72 | 659.36 | 659.36 |
| 528 | Ac-LTF%r8HYWAQL%A-NH₂ | 1252 | 1583.89 | 792.95 | 793.01 |
| 529 | Ac-LTF$r8HCouWAQL$S-NH₂ | 1253 | 1679.87 | 840.94 | 841.38 |
| 530 | Ac-LTFEHCouWAQLTS-NH₂ | 1254 | 1617.75 | 809.88 | 809.96 |
| 531 | Ac-LTA$r8HCouWAQL$S-NH₂ | 1255 | 1603.84 | 802.92 | 803.36 |
| 532 | Ac-F$r8AYWEAL$AbuA-NH₂ | 1256 | 1387.75 | 694.88 | 694.88 |
| 533 | Ac-F$r8AYWEAI$AA-NH₂ | 1257 | 1373.74 | 687.87 | 687.93 |
| 534 | Ac-F$r8AYWEANle$AA-NH₂ | 1258 | 1373.74 | 687.87 | 687.93 |
| 535 | Ac-F$r8AYWEAmlL$AA-NH₂ | 1259 | 1429.80 | 715.90 | 715.97 |
| 536 | Ac-F$r8AYWQAL$AA-NH₂ | 1260 | 1372.75 | 687.38 | 687.48 |
| 537 | Ac-F$r8AYWAAL$AA-NH₂ | 1261 | 1315.73 | 658.87 | 658.92 |
| 538 | Ac-F$r8AYWAbuAL$AA-NH₂ | 1262 | 1329.75 | 665.88 | 665.95 |
| 539 | Ac-F$r8AYWNleAL$AA-NH₂ | 1263 | 1357.78 | 679.89 | 679.94 |
| 540 | Ac-F$r8AbuYWEAL$AA-NH₂ | 1264 | 1387.75 | 694.88 | 694.96 |
| 541 | Ac-F$r8NleYWEAL$AA-NH₂ | 1265 | 1415.79 | 708.90 | 708.94 |
| 542 | Ac-F$r8FYWEAL$AA-NH₂ | 1266 | 1449.77 | 725.89 | 725.97 |
| 543 | Ac-LTF$r8HYWAQhL$S-NH₂ | 1267 | 1611.88 | 806.94 | 807 |
| 544 | Ac-LTF$r8HYWAQAdm$S-NH₂ | 1268 | 1675.91 | 838.96 | 839.04 |
| 545 | Ac-LTF$r8HYWAQIgl$S-NH₂ | 1269 | 1659.88 | 830.94 | 829.94 |
| 546 | Ac-F$r8AYWAQL$AA-NH₂ | 1270 | 1372.75 | 687.38 | 687.48 |
| 547 | Ac-LTF$r8ALWAQL$Q-NH₂ | 1271 | 1522.89 | 762.45 | 762.52 |
| 548 | Ac-F$r8AYWEAL$AA-NH₂ | 1272 | 1373.74 | 687.87 | 687.93 |
| 549 | Ac-F$r8AYWENleL$AA-NH₂ | 1273 | 1415.79 | 708.90 | 708.94 |
| 550 | Ac-F$r8AYWEAibL$Abu-NH₂ | 1274 | 1330.73 | 666.37 | 666.39 |
| 551 | Ac-F$r8AYWENleL$Abu-NH₂ | 1275 | 1358.76 | 680.38 | 680.38 |
| 552 | Ac-F$r8AYWEAL$Abu-NH₂ | 1276 | 1316.72 | 659.36 | 659.36 |
| 553 | Ac-F$r8AYWEAc3cL$AbuA-NH₂ | 1277 | 1399.75 | 700.88 | 700.95 |
| 554 | Ac-F$r8AYWEAc3cL$NleA-NH₂ | 1278 | 1427.79 | 714.90 | 715.01 |
| 555 | H-LTF$r8AYWAQL$S-NH₂ | 1279 | 1489.83 | 745.92 | 745.95 |
| 556 | mdPEG3-LTF$r8AYWAQL$S-NH₂ | 1280 | 1679.92 | 840.96 | 840.97 |
| 557 | mdPEG7-LTF$r8AYWAQL$S-NH₂ | 1281 | 1856.02 | 929.01 | 929.03 |
| 558 | Ac-F$r8ApmpEt6clWEAL$A-NH₂ | 1282 | 1470.71 | 736.36 | 788.17 |
| 559 | Ac-LTF3Cl$r8AYWAQL$S-NH₂ | 1283 | 1565.81 | 783.91 | 809.18 |
| 560 | Ac-LTF3Cl$r8HYWAQL$A-NH₂ | 1284 | 1615.83 | 808.92 | 875.24 |
| 561 | Ac-LTF3Cl$r8HYWWQL$S-NH₂ | 1285 | 1746.87 | 874.44 | 841.65 |
| 562 | Ac-LTF3Cl$r8AYWWQL$S-NH₂ | 1286 | 1680.85 | 841.43 | 824.63 |
| 563 | Ac-LTF$r8AYWWQL$S-NH₂ | 1287 | 1646.89 | 824.45 | 849.98 |
| 564 | Ac-LTF$r8HYWWQL$A-NH₂ | 1288 | 1696.91 | 849.46 | 816.67 |
| 565 | Ac-LTF$r8AYWWQL$A-NH₂ | 1289 | 1630.89 | 816.45 | 776.15 |
| 566 | Ac-LTF4F$r8AYWAQL$S-NH₂ | 1290 | 1549.83 | 775.92 | 776.15 |
| 567 | Ac-LTF2F$r8AYWAQL$S-NH₂ | 1291 | 1549.83 | 775.92 | 776.15 |
| 568 | Ac-LTF3F$r8AYWAQL$S-NH₂ | 1292 | 1549.83 | 775.92 | 785.12 |
| 569 | Ac-LTF34F2$r8AYWAQL$S-NH₂ | 1293 | 1567.83 | 784.92 | 785.12 |
| 570 | Ac-LTF35F2$r8AYWAQL$S-NH₂ | 1294 | 1567.83 | 784.92 | 1338.74 |
| 571 | Ac-F3Cl$r8AYWEAL$A-NH₂ | 1295 | 1336.66 | 669.33 | 705.28 |
| 572 | Ac-F3Cl$r8AYWEAL$AA-NH₂ | 1296 | 1407.70 | 704.85 | 680.11 |
| 573 | Ac-F$r8AY6clWEAL$AA-NH₂ | 1297 | 1407.70 | 704.85 | 736.83 |
| 574 | Ac-F$r8AY6clWEAL$-NH₂ | 1298 | 1265.63 | 633.82 | 784.1 |
| 575 | Ac-LTF$r8HYWAQLSt/S-NH₂ | 1299 | 16.03 | 9.02 | 826.98 |
| 576 | Ac-LTF$r8HYWAQL$S-NHsBu | 1300 | 1653.93 | 827.97 | 828.02 |
| 577 | Ac-STF$r8AYWAQL$S-NH₂ | 1301 | 1505.79 | 753.90 | 753.94 |
| 578 | Ac-LTF$r8AYWAEL$S-NH₂ | 1302 | 1532.83 | 767.42 | 767.41 |
| 579 | Ac-LTF$r8AYWAQL$E-NH₂ | 1303 | 1573.85 | 787.93 | 787.98 |
| 580 | mdPEG3-LTF$r8AYWAQL$S-NH₂ | 1304 | 1679.92 | 840.96 | 840.97 |
| 581 | Ac-LTF$r8AYWAQhL$S-NH₂ | 1305 | 1545.86 | 773.93 | 774.31 |
| 583 | Ac-LTF$r8AYWAQCha$S-NH₂ | 1306 | 1571.88 | 786.94 | 787.3 |
| 584 | Ac-LTF$r8AYWAQChg$S-NH₂ | 1307 | 1557.86 | 779.93 | 780.4 |
| 585 | Ac-LTF$r8AYWAQCba$S-NH₂ | 1308 | 1543.84 | 772.92 | 780.13 |
| 586 | Ac-LTF$r8AYWAQF$S-NH₂ | 1309 | 1565.83 | 783.92 | 784.2 |
| 587 | Ac-LTF4F$r8HYWAQhL$S-NH₂ | 1310 | 1629.87 | 815.94 | 815.36 |
| 588 | Ac-LTF4F$r8HYWAQCha$S-NH₂ | 1311 | 1655.89 | 828.95 | 828.39 |
| 589 | Ac-LTF4F$r8HYWAQChg$S-NH₂ | 1312 | 1641.87 | 821.94 | 821.35 |
| 590 | Ac-LTF4F$r8HYWAQCba$S-NH₂ | 1313 | 1627.86 | 814.93 | 814.32 |
| 591 | Ac-LTF4F$r8AYWAQhL$S-NH₂ | 1314 | 1563.85 | 782.93 | 782.36 |
| 592 | Ac-LTF4F$r8AYWAQCha$S-NH₂ | 1315 | 1589.87 | 795.94 | 795.38 |
| 593 | Ac-LTF4F$r8AYWAQChg$S-NH₂ | 1316 | 1575.85 | 788.93 | 788.35 |
| 594 | Ac-LTF4F$r8AYWAQCba$S-NH₂ | 1317 | 1561.83 | 781.92 | 781.39 |
| 595 | Ac-LTF3Cl$r8AYWAQhL$S-NH₂ | 1318 | 1579.82 | 790.91 | 790.35 |
| 596 | Ac-LTF3Cl$r8AYWAQCha$S-NH₂ | 1319 | 1605.84 | 803.92 | 803.67 |
| 597 | Ac-LTF3Cl$r8AYWAQChg$S-NH₂ | 1320 | 1591.82 | 796.91 | 796.34 |
| 598 | Ac-LTF3Cl$r8AYWAQCba$S-NH₂ | 1321 | 1577.81 | 789.91 | 789.39 |
| 599 | Ac-LTF$r8AYWAQhF$S-NH₂ | 1322 | 1579.84 | 790.92 | 791.14 |
| 600 | Ac-LTF$r8AYWAQF3CF3$S-NH₂ | 1323 | 1633.82 | 817.91 | 818.15 |
| 601 | Ac-LTF$r8AYWAQF3Me$S-NH₂ | 1324 | 1581.86 | 791.93 | 791.32 |
| 602 | Ac-LTF$r8AYWAQ1Nal$S-NH₂ | 1325 | 1615.84 | 808.92 | 809.18 |
| 603 | Ac-LTF$r8AYWAQBip$S-NH₂ | 1326 | 1641.86 | 821.93 | 822.13 |
| 604 | Ac-LTF$r8FYWAQL$A-NH₂ | 1327 | 1591.88 | 796.94 | 797.33 |
| 605 | Ac-LTF$r8HYWAQL$S-NHAm | 1328 | 1667.94 | 834.97 | 835.92 |
| 606 | Ac-LTF$r8HYWAQL$S-NHiAm | 1329 | 1667.94 | 834.97 | 835.55 |
| 607 | Ac-LTF$r8HYWAQL$S-NHnPr3Ph | 1330 | 1715.94 | 858.97 | 859.79 |
| 608 | Ac-LTF$r8HYWAQL$S-NHnBu3, 3Me | 1331 | 1681.96 | 841.98 | 842.49 |
| 610 | Ac-LTF$r8HYWAQL$S-NHnPr | 1332 | 1639.91 | 820.96 | 821.58 |
| 611 | Ac-LTF$r8HYWAQL$S-NHnEt2Ch | 1333 | 1707.98 | 854.99 | 855.35 |
| 612 | Ac-LTF$r8HYWAQL$S-NHHex | 1334 | 1681.96 | 841.98 | 842.4 |
| 613 | Ac-LTF$r8AYWAQL$S-NHmdPeg2 | 1335 | 1633.91 | 817.96 | 818.35 |
| 614 | Ac-LTF$r8AYWAQL$A-NHmdPeg2 | 1336 | 1617.92 | 809.96 | 810.3 |
| 615 | Ac-LTF$r8AYwAQL$A-NHmdPeg4 | 1337 | 1705.97 | 853.99 | 854.33 |
| 616 | Ac-F$r8AYd14mwEAL$A-NH₂ | 1338 | 1316.72 | 659.36 | 659.44 |
| 617 | Ac-F$r8AYdl5clWEAL$A-NH₂ | 1339 | 1336.66 | 669.33 | 669.43 |
| 618 | Ac-LThF$r8AYWAQL$S-NH₂ | 1340 | 1545.86 | 773.93 | 774.11 |
| 619 | Ac-LT2Nal$r8AYwAQL$S-NH₂ | 1341 | 1581.86 | 791.93 | 792.43 |
| 620 | Ac-LTA$r8AYWAQL$S-NH₂ | 1342 | 1455.81 | 728.91 | 729.15 |
| 621 | Ac-LTF$r8AYWVQL$S-NH₂ | 1343 | 1559.88 | 780.94 | 781.24 |
| 622 | Ac-LTF$r8HYWAAL$A-NH₂ | 1344 | 1524.85 | 763.43 | 763.86 |
| 623 | Ac-LTF$r8VYWAQL$A-NH₂ | 1345 | 1543.88 | 772.94 | 773.37 |
| 624 | Ac-LTF$r8IYWAQL$S-NH₂ | 1346 | 1573.89 | 787.95 | 788.17 |
| 625 | Ac-FTF$r8VYWSQL$S-NH₂ | 1347 | 1609.85 | 805.93 | 806.22 |
| 626 | Ac-ITF$r8FYWAQL$S-NH₂ | 1348 | 1607.88 | 804.94 | 805.2 |
| 627 | Ac-2NalTF$r8VYWSQL$S-NH₂ | 1349 | 1659.87 | 830.94 | 831.2 |
| 628 | Ac-ITF$r8LYWSQL$S-NH₂ | 1350 | 1589.89 | 795.95 | 796.13 |
| 629 | Ac-FTF$r8FYWAQL$S-NH₂ | 1351 | 1641.86 | 821.93 | 822.13 |
| 630 | Ac-WTF$r8VYWAQL$S-NH₂ | 1352 | 1632.87 | 817.44 | 817.69 |
| 631 | Ac-WTF$r8WYWAQL$S-NH₂ | 1353 | 1719.88 | 860.94 | 861.36 |
| 632 | Ac-VTF$r8AYWSQL$S-NH₂ | 1354 | 1533.82 | 767.91 | 768.19 |
| 633 | Ac-WTF$r8FYWSQL$S-NH₂ | 1355 | 1696.87 | 849.44 | 849.7 |
| 634 | Ac-FTF$r8IYWAQL$S-NH₂ | 1356 | 1607.88 | 804.94 | 805.2 |
| 635 | Ac-WTF$r8VYWSQL$S-NH₂ | 1357 | 1648.87 | 825.44 | 824.8 |
| 636 | Ac-FTF$r8LYWSQL$S-NH₂ | 1358 | 1623.87 | 812.94 | 812.8 |
| 637 | Ac-YTF$r8FYWSQL$S-NH₂ | 1359 | 1673.85 | 837.93 | 837.8 |
| 638 | Ac-LTF$r8AY6clWEAL$A-NH₂ | 1360 | 1550.79 | 776.40 | 776.14 |
| 639 | Ac-LTF$r8AY6clWSQL$S-NH₂ | 1361 | 1581.80 | 791.90 | 791.68 |
| 640 | Ac-F$r8AY6clWSAL$A-NH₂ | 1362 | 1294.65 | 648.33 | 647.67 |
| 641 | Ac-F$r8AY6clWQAL$AA-NH₂ | 1363 | 1406.72 | 704.36 | 703.84 |
| 642 | Ac-LHF$r8AYWAQL$S-NH₂ | 1364 | 1567.86 | 784.93 | 785.21 |
| 643 | Ac-LTF$r8AYWAQL$S-NH₂ | 1365 | 1531.84 | 766.92 | 767.17 |
| 644 | Ac-LTF$r8AHWAQL$S-NH₂ | 1366 | 1505.84 | 753.92 | 754.13 |
| 645 | Ac-LTF$r8AYWAHL$S-NH₂ | 1367 | 1540.84 | 771.42 | 771.61 |
| 646 | Ac-LTF$r8AYWAQL$H-NH₂ | 1368 | 1581.87 | 791.94 | 792.15 |
| 647 | H-LTF$r8AYWAQL$A-NH₂ | 1369 | 1473.84 | 737.92 | 737.29 |
| 648 | Ac-HHF$r8AYWAQL$S-NH₂ | 1370 | 1591.83 | 796.92 | 797.35 |
| 649 | Ac-aAibWTF$r8VYWSQL$S-NH₂ | 1371 | 1804.96 | 903.48 | 903.64 |
| 650 | Ac-AibWTF$r8HYWAQL$S-NH₂ | 1372 | 1755.91 | 878.96 | 879.4 |
| 651 | Ac-AibAWTF$r8HYWAQL$S-NH₂ | 1373 | 1826.95 | 914.48 | 914.7 |
| 652 | Ac-fWTF$r8HYWAQL$S-NH₂ | 1374 | 1817.93 | 909.97 | 910.1 |
| 653 | Ac-AibWWTF$r8HYWAQL$S-NH₂ | 1375 | 1941.99 | 972.00 | 972.2 |
| 654 | Ac-WTF$r8LYWSQL$S-NH₂ | 1376 | 1662.88 | 832.44 | 832.8 |
| 655 | Ac-WTF$r8NleYWSQL$S-NH₂ | 1377 | 1662.88 | 832.44 | 832.6 |
| 656 | Ac-LTF$r8AYWSQL$a-NH₂ | 1378 | 1531.84 | 766.92 | 767.2 |
| 657 | Ac-LTF$r8EYWARL$A-NH₂ | 1379 | 1601.90 | 801.95 | 802.1 |
| 658 | Ac-LTF$r8EYWAHL$A-NH₂ | 1380 | 1582.86 | 792.43 | 792.6 |
| 659 | Ac-aTF$r8AYWAQL$S-NH₂ | 1381 | 1489.80 | 745.90 | 746.08 |
| 660 | Ac-AibTF$r8AYWAQL$S-NH₂ | 1382 | 1503.81 | 752.91 | 753.11 |
| 661 | Ac-AmfTF$r8AYWAQL$S-NH₂ | 1383 | 1579.84 | 790.92 | 791.14 |
| 662 | Ac-AmwTF$r8AYWAQL$S-NH₂ | 1384 | 1618.86 | 810.43 | 810.66 |
| 663 | Ac-NmLTF$r8AYWAQL$S-NH₂ | 1385 | 1545.86 | 773.93 | 774.11 |
| 664 | Ac-LNmTF$r8AYWAQL$S-NH₂ | 1386 | 1545.86 | 773.93 | 774.11 |
| 665 | Ac-LSarF$r8AYWAQL$S-NH₂ | 1387 | 1501.83 | 751.92 | 752.18 |
| 667 | Ac-LGF$r8AYWAQL$S-NH₂ | 1388 | 1487.82 | 744.91 | 745.15 |
| 668 | Ac-LTNmF$r8AYWAQL$S-NH₂ | 1389 | 1545.86 | 773.93 | 774.2 |
| 669 | Ac-TF$r8AYWAQL$S-NH₂ | 1390 | 1418.76 | 710.38 | 710.64 |
| 670 | Ac-ETF$r8AYWAQL$A-NH₂ | 1391 | 1531.81 | 766.91 | 767.2 |
| 671 | Ac-LTF$r8EYWAQL$A-NH₂ | 1392 | 1573.85 | 787.93 | 788.1 |
| 672 | Ac-LT2Nal$r8AYWSQL$S-NH₂ | 1393 | 1597.85 | 799.93 | 800.4 |
| 673 | Ac-LTF$r8AYWAAL$S-NH₂ | 1394 | 1474.82 | 738.41 | 738.68 |
| 674 | Ac-LTF$r8AYWAQhCha$S-NH₂ | 1395 | 1585.89 | 793.95 | 794.19 |
| 675 | Ac-LTF$r8AYWAQChg$S-NH₂ | 1396 | 1557.86 | 779.93 | 780.97 |
| 676 | Ac-LTF$r8AYWAQCba$S-NH₂ | 1397 | 1543.84 | 772.92 | 773.19 |
| 677 | Ac-LTF$r8AYWAQF3CF3$S-NH₂ | 1398 | 1633.82 | 817.91 | 818.15 |
| 678 | Ac-LTF$r8AYWAQ1Nal$S-NH₂ | 1399 | 1615.84 | 808.92 | 809.18 |
| 679 | Ac-LTF$r8AYWAQBip$S-NH₂ | 1400 | 1641.86 | 821.93 | 822.32 |
| 680 | Ac-LT2Nal$r8AYWAQL$S-NH₂ | 1401 | 1581.86 | 791.93 | 792.15 |
| 681 | Ac-LTF$r8AYWVQL$S-NH₂ | 1402 | 1559.88 | 780.94 | 781.62 |
| 682 | Ac-LTF$r8AWWAQL$S-NH₂ | 1403 | 1554.86 | 778.43 | 778.65 |
| 683 | Ac-FTF$r8VYWSQL$S-NH₂ | 1404 | 1609.85 | 805.93 | 806.12 |
| 684 | Ac-ITF$r8FYWAQL$S-NH₂ | 1405 | 1607.88 | 804.94 | 805.2 |
| 685 | Ac-ITF$r8LYWSQL$S-NH₂ | 1406 | 1589.89 | 795.95 | 796.22 |
| 686 | Ac-FTF$r8FYWAQL$S-NH₂ | 1407 | 1641.86 | 821.93 | 822.41 |
| 687 | Ac-VTF$r8AYWSQL$S-NH₂ | 1408 | 1533.82 | 767.91 | 768.19 |
| 688 | Ac-LTF$r8AHWAQL$S-NH₂ | 1409 | 1505.84 | 753.92 | 754.31 |
| 689 | Ac-LTF$r8AYWAQL$H-NH₂ | 1410 | 1581.87 | 791.94 | 791.94 |
| 690 | Ac-LTF$r8AYWAHL$S-NH₂ | 1411 | 1540.84 | 771.42 | 771.61 |
| 691 | Ac-aAibWTF$r8VYWSQL$S-NH₂ | 1412 | 1804.96 | 903.48 | 903.9 |
| 692 | Ac-AibWTF$r8HYWAQL$S-NH₂ | 1413 | 1755.91 | 878.96 | 879.5 |
| 693 | Ac-AibAWTF$r8HYWAQL$S-NH₂ | 1414 | 1826.95 | 914.48 | 914.7 |
| 694 | Ac-fWTF$r8HYWAQL$S-NH₂ | 1415 | 1817.93 | 909.97 | 910.2 |
| 695 | Ac-AibWWTF$r8HYWAQL$S-NH₂ | 1416 | 1941.99 | 972.00 | 972.7 |
| 696 | Ac-WTF$r8LYWSQL$S-NH₂ | 1417 | 1662.88 | 832.44 | 832.7 |
| 697 | Ac-WTF$r8NleYWSQL$S-NH₂ | 1418 | 1662.88 | 832.44 | 832.7 |
| 698 | Ac-LTF$r8AYWSQL$a-NH₂ | 1419 | 1531.84 | 766.92 | 767.2 |
| 699 | Ac-LTF$r8EYWARL$A-NH₂ | 1420 | 1601.90 | 801.95 | 802.2 |
| 700 | Ac-LTF$r8EYWAHL$A-NH₂ | 1421 | 1582.86 | 792.43 | 792.6 |
| 701 | Ac-aTF$r8AYWAQL$S-NH₂ | 1422 | 1489.80 | 745.90 | 746.1 |
| 702 | Ac-AibTF$r8AYWAQL$S-NH₂ | 1423 | 1503.81 | 752.91 | 753.2 |
| 703 | Ac-AmfTF$r8AYWAQL$S-NH₂ | 1424 | 1579.84 | 790.92 | 791.2 |
| 704 | Ac-AmwTF$r8AYWAQL$S-NH₂ | 1425 | 1618.86 | 810.43 | 810.7 |
| 705 | Ac-NmLTF$r8AYWAQL$S-NH₂ | 1426 | 1545.86 | 773.93 | 774.1 |
| 706 | Ac-LNmTF$r8AYWAQL$S-NH₂ | 1427 | 1545.86 | 773.93 | 774.4 |
| 707 | Ac-LSarF$r8AYWAQL$S-NH₂ | 1428 | 1501.83 | 751.92 | 752.1 |
| 708 | Ac-TF$r8AYWAQL$S-NH₂ | 1429 | 1418.76 | 710.38 | 710.8 |
| 709 | Ac-ETF$r8AYWAQL$A-NH₂ | 1430 | 1531.81 | 766.91 | 767.4 |
| 710 | Ac-LTF$r8EYWAQL$A-NH₂ | 1431 | 1573.85 | 787.93 | 788.2 |
| 711 | Ac-WTF$r8VYWSQL$S-NH₂ | 1432 | 1648.87 | 825.44 | 825.2 |
| 713 | Ac-YTF$r8FYWSQL$S-NH₂ | 1433 | 1673.85 | 837.93 | 837.3 |
| 714 | Ac-F$r8AY6clWSAL$A-NH₂ | 1434 | 1294.65 | 648.33 | 647.74 |
| 715 | Ac-ETF$r8EYWVQL$S-NH₂ | 1435 | 1633.84 | 817.92 | 817.36 |
| 716 | Ac-ETF$r8EHWAQL$A-NH₂ | 1436 | 1563.81 | 782.91 | 782.36 |
| 717 | Ac-ITF$r8EYWAQL$S-NH₂ | 1437 | 1589.85 | 795.93 | 795.38 |
| 718 | Ac-ITF$r8EHWVQL$A-NH₂ | 1438 | 1575.88 | 788.94 | 788.42 |
| 719 | Ac-ITF$r8EHWAQL$S-NH₂ | 1439 | 1563.85 | 782.93 | 782.43 |
| 720 | Ac-LTF4F$r8AYWAQCba$S-NH₂ | 1440 | 1561.83 | 781.92 | 781.32 |
| 721 | Ac-LTF3Cl$r8AYWAQhL$S-NH₂ | 1441 | 1579.82 | 790.91 | 790.64 |
| 722 | Ac-LTF3Cl$r8AYWAQCha$S-NH₂ | 1442 | 1605.84 | 803.92 | 803.37 |
| 723 | Ac-LTF3Cl$r8AYWAQChg$S-NH₂ | 1443 | 1591.82 | 796.91 | 796.27 |
| 724 | Ac-LTF3Cl$r8AYWAQCba$S-NH₂ | 1444 | 1577.81 | 789.91 | 789.83 |
| 725 | Ac-LTF$r8AY6clWSQL$S-NH₂ | 1445 | 1581.80 | 791.90 | 791.75 |
| 726 | Ac-LTF4F$r8HYWAQhL$S-NH₂ | 1446 | 1629.87 | 815.94 | 815.36 |
| 727 | Ac-LTF4F$r8HYWAQCba$S-NH₂ | 1447 | 1627.86 | 814.93 | 814.32 |
| 728 | Ac-LTF4F$r8AYWAQhL$S-NH₂ | 1448 | 1563.85 | 782.93 | 782.36 |
| 729 | Ac-LTF4F$r8AYWAQChg$S-NH₂ | 1449 | 1575.85 | 788.93 | 788.35 |
| 730 | Ac-ETF$r8EYWVAL$S-NH₂ | 1450 | 1576.82 | 789.41 | 788.79 |
| 731 | Ac-ETF$r8EHWAAL$A-NH₂ | 1451 | 1506.79 | 754.40 | 754.8 |
| 732 | Ac-ITF$r8EYWAAL$S-NH₂ | 1452 | 1532.83 | 767.42 | 767.75 |
| 733 | Ac-ITF$r8EHWVAL$A-NH₂ | 1453 | 1518.86 | 760.43 | 760.81 |
| 734 | Ac-ITF$r8EHWAAL$S-NH₂ | 1454 | 1506.82 | 754.41 | 754.8 |
| 735 | Pam-LTF$r8EYWAQL$S-NH₂ | 1455 | 1786.07 | 894.04 | 894.48 |
| 736 | Pam-ETF$r8EYWAQL$S-NH₂ | 1456 | 1802.03 | 902.02 | 902.34 |
| 737 | Ac-LTF$r8AYWLQL$S-NH₂ | 1457 | 1573.89 | 787.95 | 787.39 |
| 738 | Ac-LTF$r8EYWLQL$S-NH₂ | 1458 | 1631.90 | 816.95 | 817.33 |
| 739 | Ac-LTF$r8EHWLQL$S-NH₂ | 1459 | 1605.89 | 803.95 | 804.29 |
| 740 | Ac-LTF$r8VYWAQL$S-NH₂ | 1460 | 1559.88 | 780.94 | 781.34 |
| 741 | Ac-LTF$r8AYWSQL$S-NH₂ | 1461 | 1547.84 | 774.92 | 775.33 |
| 742 | Ac-ETF$r8AYWAQL$S-NH₂ | 1462 | 1547.80 | 774.90 | 775.7 |
| 743 | Ac-LTF$r8EYWAQL$S-NH₂ | 1463 | 1589.85 | 795.93 | 796.33 |
| 744 | Ac-LTF$r8HYWAQL$S-NHAm | 1464 | 1667.94 | 834.97 | 835.37 |
| 745 | Ac-LTF$r8HYWAQL$S-NHiAm | 1465 | 1667.94 | 834.97 | 835.27 |
| 746 | Ac-LTF$r8HYWAQL$S-NHnPr3Ph | 1466 | 1715.94 | 858.97 | 859.42 |
| 747 | Ac-LTF$r8HYWAQL$S-NHnBu3, 3Me | 1467 | 1681.96 | 841.98 | 842.67 |
| 748 | Ac-LTF$r8HYWAQL$S-NHnBu | 1468 | 1653.93 | 827.97 | 828.24 |
| 749 | Ac-LTF$r8HYWAQL$S-NHnPr | 1469 | 1639.91 | 820.96 | 821.31 |
| 750 | Ac-LTF$r8HYWAQL$S-NHnEt2Ch | 1470 | 1707.98 | 854.99 | 855.35 |
| 751 | Ac-LTF$r8HYWAQL$S-NHHex | 1471 | 1681.96 | 841.98 | 842.4 |
| 752 | Ac-LTF$r8AYWAQL$S-NHmdPeg2 | 1472 | 1633.91 | 817.96 | 855.35 |
| 753 | Ac-LTF$r8AYWAQL$A-NHmdPeg2 | 1473 | 1617.92 | 809.96 | 810.58 |
| 754 | Ac-LTF$r5AYWAAL$s8S-NH₂ | 1474 | 1474.82 | 738.41 | 738.79 |
| 755 | Ac-LTF$r8AYWCouQL$S-NH₂ | 1475 | 1705.88 | 853.94 | 854.61 |
| 756 | Ac-LTF$r8CouYWAQL$S-NH₂ | 1476 | 1705.88 | 853.94 | 854.7 |
| 757 | Ac-CouTF$r8AYWAQL$S-NH₂ | 1477 | 1663.83 | 832.92 | 833.33 |
| 758 | H-LTF$r8AYWAQL$A-NH₂ | 1478 | 1473.84 | 737.92 | 737.29 |
| 759 | Ac-HHF$r8AYWAQL$S-NH₂ | 1479 | 1591.83 | 796.92 | 797.72 |
| 760 | Ac-LT2Nal$r8AYWSQL$S-NH₂ | 1480 | 1597.85 | 799.93 | 800.68 |
| 761 | Ac-LTF$r8HCouWAQL$S-NH₂ | 1481 | 1679.87 | 840.94 | 841.38 |
| 762 | Ac-LTF$r8AYWCou2QL$S-NH₂ | 1482 | 1789.94 | 895.97 | 896.51 |
| 763 | Ac-LTF$r8Cou2YWAQL$S-NH₂ | 1483 | 1789.94 | 895.97 | 896.5 |
| 764 | Ac-Cou2TF$r8AYWAQL$S-NH₂ | 1484 | 1747.90 | 874.95 | 875.42 |
| 765 | Ac-LTF$r8ACou2WAQL$S-NH₂ | 1485 | 1697.92 | 849.96 | 850.82 |
| 766 | Dmaac-LTF$r8AYWAQL$S-NH₂ | 1486 | 1574.89 | 788.45 | 788.82 |
| 767 | Hexac-LTF$r8AYWAQL$S-NH₂ | 1487 | 1587.91 | 794.96 | 795.11 |
| 768 | Napac-LTF$r8AYWAQL$S-NH₂ | 1488 | 1657.89 | 829.95 | 830.36 |
| 769 | Pam-LTF$r8AYWAQL$S-NH₂ | 1489 | 1728.06 | 865.03 | 865.45 |
| 770 | Ac-LT2Nal$r8HYAAQL$S-NH₂ | 1490 | 1532.84 | 767.42 | 767.61 |
| 771 | Ac-LT2Nal$/r8HYWAQL$/S-NH₂ | 1491 | 1675.91 | 838.96 | 839.1 |
| 772 | Ac-LT2Nal$r8HYFAQL$S-NH₂ | 1492 | 1608.87 | 805.44 | 805.9 |
| 773 | Ac-LT2Nal$r8HWAAQL$S-NH₂ | 1493 | 1555.86 | 778.93 | 779.08 |
| 774 | Ac-LT2Nal$r8HYAWQL$S-NH₂ | 1494 | 1647.88 | 824.94 | 825.04 |
| 775 | Ac-LT2Nal$r8HYAAQW$S-NH₂ | 1495 | 1605.83 | 803.92 | 804.05 |
| 776 | Ac-LTW$r8HYWAQL$S-NH₂ | 1496 | 1636.88 | 819.44 | 819.95 |
| 777 | Ac-LT1Nal$r8HYWAQL$S-NH₂ | 1497 | 1647.88 | 824.94 | 825.41 |

[0660] In some embodiments, a peptidomimetic macrocycles disclosed herein does not comprise a peptidomimetic macrocycle structure as shown in TABLE 2b.

[0661] TABLE 2c shows examples of non-crosslinked polypeptides comprising D-amino acids.

TABLE 2C

| | | SEQ | | Exact | Found | Calc | Calc | Calc |
|---|---|---|---|---|---|---|---|---|
| SP | Sequence | ID NO: | Isomer | Mass | Mass | (M + 1)/1 | (M + 2)/2 | (M + 3)/3 |
| 765 | Ac-tawyanfekllr-NH₂ | 1498 | 777.46 | | | | | |
| 766 | Ac-tawyanf4CF3ekllr-NH₂ | 1499 | 811.41 | | | | | |

### Example 3: Preparation of Peptidomimetic Macrocycles Using a Boc-Protected Amino Acid

[0662] Peptidomimetic macrocycle precursors comprising an R8 amino acid at position “i” and an S5 amino acid at position “i+7” were prepared. The amino acid at position “i+3” was a Boc-protected tryptophan, which was incorporated during solid-phase synthesis. Specifically, the Boc-protected tryptophan amino acid shown below was used during solid phase synthesis:

[chemical structure]

[0663] Metathesis was performed using a ruthenium catalyst prior to the cleavage and deprotection steps. The composition obtained following cyclization was determined by HPLC analysis, and was found to contain primarily peptidomimetic macrocycles having a crosslinker comprising a trans olefin (“iso2”, comprising the double bond in an E configuration). Unexpectedly, a ratio of 90:10 was observed for the trans and cis products, respectively.

### Example 4: Preparation of Peptidomimetic Macrocycles Using a Boc-Protected Amino Acid

[0664] Peptidomimetic macrocycles were first dissolved in neat N, N-dimethylacetamide (DMA) to make 20× stock solutions over a concentration range of 20-140 mg/mL. The DMA stock solutions were diluted 20-fold in an aqueous vehicle containing 2% Solutol-HS-15, 25 mM histidine, and 45 mg/mL mannitol to obtain final concentrations of 1-7 mg/ml of the peptidomimetic macrocycles in 5% DMA, 2% Solutol-HS-15, 25 mM histidine, and 45 mg/mL mannitol. The final solutions were mixed gently by repeat pipetting or light vortexing. The final solutions were sonicated for 10 min at room temperature in an ultrasonic water bath. Careful visual observations were performed under a hood light using a 7× visual amplifier to determine if precipitates existed on the bottom of the flasks or as a suspension. Additional concentration ranges were tested as needed to determine the maximum solubility limit for each peptidomimetic macrocycle.

### Example 5: X-Ray Co-Crystallography of Peptidomimetic Macrocycles in Complex with MDMX

[0665] For co-crystallization with peptide 46 (TABLE 2b), a stoichiometric amount of compound from a 100 mM stock solution in DMSO was added to a zebrafish MDMX protein solution. The solution was allowed to sit overnight at 4° C. before setting up crystallization experiments. Protein (residues 15-129, L46V/V95L) was obtained from an E. coli BL21 (DE3) expression system using the pET15b vector. Cells were grown at 37° C. and induced with 1 mM IPTG at an OD₆₀₀ of 0.7. Cells were allowed to grow an additional 18 hr at 23° C. The protein was purified using Ni-NT Agarose followed by Superdex 75 buffered with 50 mM NaPO₄, pH 8.0, 150 mM NaCl, and 2 mM TCEP, and concentrating to 24 mg/ml. The buffer was exchanged to 20 mM Tris, pH 8.0, 50 mM NaCl, and 2 mM DTT for crystallization experiments. Initial crystals were obtained with the Nextal AMS screen #94, and the final optimized reservoir was 2.6 M AMS, 75 mM Hepes, pH 7.5. Crystals grew routinely as thin plates at 4° C. and were cryo-protected by pulling the crystals through a solution containing concentrated (3.4 M) malonate followed by flash cooling, storage, and shipment in liquid nitrogen.

[0666] Data collection was performed at the APS at beamline 31-ID (SGX-CAT) at 100° K and wavelength 0.97929 Å. The beamline was equipped with a Rayonix 225-HE detector. For data collection, crystals were rotated through 180° in 1° increments using 0.8 second exposure times. Data were processed and reduced using Mosflm/scala (CCP4) in space group C2 (unit cell: a=109.2786, b=81.0836, c=30.9058 Å, α=90, β=89.8577, γ=90°). Molecular replacement with program Molrep (CCP4) was performed with the MDMX component of the structure, and two molecules were identified in the asymmetric unit. Initial refinement of just the two molecules of the zebrafish MDMX with program Refmac (CCP4) resulted in an R-factor of 0.3424 (R_{free}=0.3712) and rmsd values for bonds (0.018 Å) and angles (1.698°). The electron densities of the stapled peptide components, starting with Gln¹⁹ and including the entire aliphatic staple, were very clear. Further refinement with CNX using data to 2.3 Å resolution resulted in a model (comprised of 1448 atoms from MDMX, 272 atoms from the stapled peptides and 46 water molecules) that was well refined (R_{f}=0.2601, R_{free}=0.3162, rmsd bonds=0.007 Å and rmsd angles=0.916°).

### Example 6: Circular Dichroism (CD) Analysis of Alpha-Helicity

[0667] Peptide solutions were analyzed by CD spectroscopy using a spectropolarimeter. A temperature controller was used to maintain temperature control of the optical cell. Results are expressed as mean molar ellipticity [0] (deg cm² dmol⁻¹) as calculated from the equation [θ]=θobs·MRW/10*l*c where θobs is the observed ellipticity in millidegrees, MRW is the mean residue weight of the peptide (peptide molecular weight/number of residues), l is the optical path length of the cell in centimeters, and c is the peptide concentration in mg/ml. Peptide concentrations were determined by amino acid analysis. Stock solutions of peptides were prepared in benign CD buffer (20 mM phosphoric acid, pH 2). The stock solutions were used to prepare peptide solutions of 0.05 mg/ml in either benign CD buffer or CD buffer with 50% trifluoroethanol (TFE) for analyses in a 10 mm path length cell. Variable wavelength measurements of peptide solutions were scanned at 4° C. from 195 to 250 nm, in 0.2 nm increments, and a scan rate 50 nm per minute. The average of six scans is reported.

[0668] TABLE 3 shows CD data for selected peptidomimetic macrocycles:

TABLE 3

| | Molar | Molar | Molar | % Helix | % Helix |
|---|---|---|---|---|---|
| | Ellipticity | Ellipticity | Ellipticity | 50% TFE | benign |
| | Benign | 50% TFE | TFE − Molar | compared | compared |
| | (222 in | (222 in | Ellipticity | to 50% TFE | to 50% TFE |
| SP# | 0% TFE) | 50% TFE) | Benign | parent (CD) | parent (CD) |
| 7 | 124 | −19921.4 | −20045.4 | 137.3 | −0.9 |
| 11 | −398.2 | −16623.4 | 16225.2 | 106.1 | 2.5 |
| 41 | −909 | −21319.4 | 20410.4 | 136 | 5.8 |
| 43 | −15334.5 | −18247.4 | 2912.9 | 116.4 | 97.8 |
| 69 | −102.6 | −21509.7 | −21407.1 | 148.2 | 0.7 |
| 71 | −121.2 | −17957 | −17835.9 | 123.7 | 0.8 |
| 154 | −916.2 | −30965.1 | −30048.9 | 213.4 | 6.3 |
| 230 | −213.2 | −17974 | −17760.8 | 123.9 | 1.5 |
| 233 | −477.9 | −19032.6 | −18554.7 | 131.2 | 3.3 |

### Example 7: Direct Binding Assay MDM2 with Fluorescence Polarization (FP)

[0669] The assay was performed according to the following general protocol:

1. Dilute MDM2 (In-house, 41 kD) into FP buffer (High salt buffer-200 mM NaCl, 5 mM CHAPS, pH 7.5) to make 10 μM working stock solution.
2. Add 30 μl of 10 μM of protein stock solution into A1 and B1 well of 96-well black HE microplate (Molecular Devices).
3. Fill in 30 μl of FP buffer into column A2 to A12, B2 to B12, C1 to C12, and D1 to D12.
4. 2 or 3 fold series dilution of protein stock from A1, B1 into A2, B2; A2, B2 to A3, B3; . . . to reach the single digit nM concentration at the last dilution point.
5. Dilute 1 mM (in 100% DMSO) of FAM labeled linear peptide with DMSO to 100 μM (dilution 1:10). Then, dilute from 100 μM to 10 μM with water (dilution 1:10) and then dilute with FP buffer from 10 μM to 40 nM (dilution 1:250). This is the working solution which will be a 10 nM concentration in well (dilution 1:4). Keep the diluted FAM labeled peptide in the dark until use.
6. Add 10 μl of 10 nM of FAM labeled peptide into each well and incubate, and read at different time points. K_{D} with 5-FAM-BaLTFEHYWAQLTS-NH₂ (SEQ ID NO: 943) is ˜13.38 nM.

### Example 8: Competitive Fluorescence Polarization Assay for MDM2

[0670] MDM2 (41 kD) was diluted into FP buffer (high-salt buffer-200 mM NaCl, 5 mM CHAPS, pH 7.5) to make a 84 nM (2×) working stock solution. 20 μl of the 84 nM (2×) protein stock solution was added into each well of a 96-well black microplate. 1 mM of FAM-labeled linear peptide (in 100% DMSO) was diluted to 100 μM with DMSO (dilution 1:10). Then, diluted solution was further diluted from 100 μM to 10 μM with water (dilution 1:10), and diluted again with FP buffer from 10 μM to 40 nM (dilution 1:250). The resulting working solution resulted in a 10 nM concentration in each well (dilution 1:4). The diluted FAM-labeled peptides were kept in the dark until use.

[0671] Unlabeled peptide dose plates were prepared with FP buffer starting with 1 μM (final) of the peptide. 5-fold serial dilutions were made for 6 points using the following dilution scheme. 10 mM of the solution (in 100% DMSO) with DMSO to 5 mM (dilution 1:2); dilution from 5 mM to 500 μM with H₂O (dilution 1:10); and dilution with FP buffer from 500 μM to 20 μM (dilution 1:25). 5-fold serial dilutions from 4 μM (4×) were made for 6 points. 10 l of the serial diluted unlabeled peptides were transferred to each well, which was filled with 20 μl of 84 nM of protein. 10 μl of 10 nM (4×) of FAM-labeled peptide was added into each well, and the wells were incubated for 3 h before being read.

### Example 9: Direct Binding Assay MDMX with Fluorescence Polarization (FP)

[0672] MDMX (40 kD) was diluted into FP buffer (high-salt buffer-200 mM NaCl, 5 mM CHAPS, pH 7.5) to make a 10 μM working stock solution. 30 μl of the 10 μM of protein stock solution was added into the A1 and B1 wells of a 96-well black microplate. 30 μl of FP buffer was added to columns A2 to A12, B2 to B12, C1 to C12, and D1 to D12. 2-fold or 3-fold series dilutions of protein stocks were created from A1, B1 into A2, B2; A2, B2 to A3, B3; . . . to reach the single digit nM concentration at the last dilution point. 1 mM (in 100% DMSO) of a FAM-labeled linear peptide was diluted with DMSO to 100 μM (dilution 1:10). The resulting solution was diluted from 100 μM to 10 μM with water (dilution 1:10), and diluted again with FP buffer from 10 μM to 40 nM (dilution 1:250). The working solution resulted in 10 nM concentration in each well (dilution 1:4). The FAM-labeled peptides were kept in the dark until use. 10 μl of the 10 nM FAM-labeled peptide was added into each well, and the plate was incubated and read at different time points. The K_{D} with 5-FAM-BaLTFEHYWAQLTS-NH₂ (SEQ ID NO: 943) was −51 nM.

### Example 10: Competitive Fluorescence Polarization Assay for MDMX

[0673] MDMX (40 kD) was diluted into FP buffer (high-salt buffer 200 mM NaCl, 5 mM CHAPS, pH 7.5) to make a 300 nM (2×) working stock solution. 20 μl of the 300 nM (2×) of protein stock solution was added into each well of 96-well black microplate. 1 mM (in 100% DMSO) of a FAM-labeled linear peptide was diluted with DMSO to a concentration of 100 μM (dilution 1:10). The solution was diluted from 100 μM to 10 μM with water (dilution 1:10), and diluted further with FP buffer from 10 μM to 40 nM (dilution 1:250). The final working solution resulted in a concentration of 10 nM per well (dilution 1:4). The diluted FAM-labeled peptide was kept in the dark until use. An unlabeled peptide dose plate was prepared with FP buffer starting with a concentration of 5 μM (final) of a peptide. 5-fold serial dilutions were prepared for 6 points using the following dilution scheme. 10 mM (in 100% DMSO) of the solution was diluted with DMSO to prepare a 5 mM (dilution 1:2) solution. The solution was diluted from 5 mM to 500 μM with H₂O (dilution 1:10), and diluted further with FP buffer from 500 μM to 20 μM (dilution 1:25). 5-fold serial dilutions from 20 μM (4×) were prepared for 6 points. 10 μl of the serially diluted unlabeled peptides were added to each well, which was filled with 20 μl of the 300 nM protein solution. 10 μl of the 10 nM (4×) FAM-labeled peptide solution was added into each well, and the wells were incubated for 3 h before reading.

[0674] Results from EXAMPLE 7-EXAMPLE 10 are shown in TABLE 4. The following scale is used: “+” represents a value greater than 1000 nM, “++” represents a value greater than 100 and less than or equal to 1000 nM, “+++” represents a value greater than 10 nM and less than or equal to 100 nM, and “++++” represents a value of less than or equal to 10 nM.

TABLE 4

| SP# | IC₅₀ (MDM2) | IC₅₀ (MDMX) | Ki (MDM2) | Ki (MDMX) |
|---|---|---|---|---|
| 3 | ++ | ++ | +++ | +++ |
| 4 | +++ | ++ | ++++ | +++ |
| 5 | +++ | ++ | ++++ | +++ |
| 6 | ++ | ++ | +++ | +++ |
| 7 | +++ | +++ | ++++ | +++ |
| 8 | ++ | ++ | +++ | +++ |
| 9 | ++ | ++ | +++ | +++ |
| 10 | ++ | ++ | +++ | +++ |
| 11 | +++ | ++ | ++++ | +++ |
| 12 | + | + | +++ | ++ |
| 13 | ++ | ++ | +++ | ++ |
| 14 | +++ | +++ | ++++ | ++++ |
| 15 | +++ | ++ | +++ | +++ |
| 16 | +++ | +++ | ++++ | +++ |
| 17 | +++ | +++ | ++++ | +++ |
| 18 | +++ | +++ | ++++ | ++++ |
| 19 | ++ | +++ | +++ | +++ |
| 20 | ++ | ++ | +++ | +++ |
| 21 | ++ | +++ | +++ | +++ |
| 22 | +++ | +++ | ++++ | +++ |
| 23 | ++ | ++ | +++ | +++ |
| 24 | +++ | ++ | ++++ | +++ |
| 26 | +++ | ++ | ++++ | +++ |
| 28 | +++ | +++ | ++++ | +++ |
| 30 | ++ | ++ | +++ | +++ |
| 32 | +++ | ++ | ++++ | +++ |
| 38 | + | ++ | ++ | +++ |
| 39 | + | ++ | ++ | ++ |
| 40 | ++ | ++ | ++ | +++ |
| 41 | ++ | +++ | +++ | +++ |
| 42 | ++ | ++ | +++ | ++ |
| 43 | +++ | +++ | ++++ | +++ |
| 45 | +++ | +++ | ++++ | ++++ |
| 46 | +++ | +++ | ++++ | +++ |
| 47 | ++ | ++ | +++ | +++ |
| 48 | ++ | ++ | +++ | +++ |
| 49 | ++ | ++ | +++ | +++ |
| 50 | +++ | ++ | ++++ | +++ |
| 52 | +++ | +++ | ++++ | ++++ |
| 54 | ++ | ++ | +++ | +++ |
| 55 | + | + | ++ | ++ |
| 65 | +++ | ++ | ++++ | +++ |
| 68 | ++ | ++ | +++ | +++ |
| 69 | +++ | ++ | ++++ | +++ |
| 70 | ++ | ++ | ++++ | +++ |
| 71 | +++ | ++ | ++++ | +++ |
| 75 | +++ | ++ | ++++ | +++ |
| 77 | +++ | ++ | ++++ | +++ |
| 80 | +++ | ++ | ++++ | +++ |
| 81 | ++ | ++ | +++ | +++ |
| 82 | ++ | ++ | +++ | +++ |
| 85 | +++ | ++ | ++++ | +++ |
| 99 | ++++ | ++ | ++++ | +++ |
| 100 | ++ | ++ | ++++ | +++ |
| 101 | +++ | ++ | ++++ | +++ |
| 102 | ++ | ++ | ++++ | +++ |
| 103 | ++ | ++ | ++++ | +++ |
| 104 | +++ | ++ | ++++ | +++ |
| 105 | +++ | ++ | ++++ | +++ |
| 106 | ++ | ++ | +++ | +++ |
| 107 | ++ | ++ | +++ | +++ |
| 108 | +++ | ++ | ++++ | +++ |
| 109 | +++ | ++ | ++++ | +++ |
| 110 | ++ | ++ | ++++ | +++ |
| 111 | ++ | ++ | ++++ | +++ |
| 112 | ++ | ++ | +++ | +++ |
| 113 | ++ | ++ | +++ | +++ |
| 114 | +++ | ++ | ++++ | +++ |
| 115 | ++++ | ++ | ++++ | +++ |
| 116 | + | + | ++ | ++ |
| 118 | ++++ | ++ | ++++ | +++ |
| 120 | +++ | ++ | ++++ | +++ |
| 121 | ++++ | ++ | ++++ | +++ |
| 122 | ++++ | ++ | ++++ | +++ |
| 123 | ++++ | ++ | ++++ | +++ |
| 124 | ++++ | ++ | ++++ | +++ |
| 125 | ++++ | ++ | ++++ | +++ |
| 126 | ++++ | ++ | ++++ | +++ |
| 127 | ++++ | ++ | ++++ | +++ |
| 128 | ++++ | ++ | ++++ | +++ |
| 129 | ++++ | ++ | ++++ | +++ |
| 130 | ++++ | ++ | ++++ | +++ |
| 133 | ++++ | ++ | ++++ | +++ |
| 134 | ++++ | ++ | ++++ | +++ |
| 135 | ++++ | ++ | ++++ | +++ |
| 136 | ++++ | ++ | ++++ | +++ |
| 137 | ++++ | ++ | ++++ | +++ |
| 139 | ++++ | ++ | ++++ | +++ |
| 142 | ++++ | +++ | ++++ | +++ |
| 144 | ++++ | ++ | ++++ | +++ |
| 146 | ++++ | ++ | ++++ | +++ |
| 148 | ++++ | ++ | ++++ | +++ |
| 150 | ++++ | ++ | ++++ | +++ |
| 153 | ++++ | +++ | ++++ | +++ |
| 154 | ++++ | +++ | ++++ | ++++ |
| 156 | ++++ | ++ | ++++ | +++ |
| 158 | ++++ | ++ | ++++ | +++ |
| 160 | ++++ | ++ | ++++ | +++ |
| 161 | ++++ | ++ | ++++ | +++ |
| 166 | ++++ | ++ | ++++ | +++ |
| 167 | +++ | ++ | ++++ | ++ |
| 169 | ++++ | +++ | ++++ | +++ |
| 170 | ++++ | ++ | ++++ | +++ |
| 173 | ++++ | ++ | ++++ | +++ |
| 175 | ++++ | ++ | ++++ | +++ |
| 177 | +++ | ++ | ++++ | +++ |
| 180 | +++ | ++ | ++++ | +++ |
| 182 | ++++ | ++ | ++++ | +++ |
| 185 | +++ | + | ++++ | ++ |
| 186 | +++ | ++ | ++++ | +++ |
| 189 | +++ | ++ | ++++ | +++ |
| 192 | +++ | ++ | ++++ | +++ |
| 194 | +++ | ++ | ++++ | ++ |
| 196 | +++ | ++ | ++++ | +++ |
| 197 | ++++ | ++ | ++++ | +++ |
| 199 | +++ | ++ | ++++ | ++ |
| 201 | +++ | ++ | ++++ | ++ |
| 203 | +++ | ++ | ++++ | +++ |
| 204 | +++ | ++ | ++++ | +++ |
| 206 | +++ | ++ | ++++ | +++ |
| 207 | ++++ | ++ | ++++ | +++ |
| 210 | ++++ | ++ | ++++ | +++ |
| 211 | ++++ | ++ | ++++ | +++ |
| 213 | ++++ | ++ | ++++ | +++ |
| 215 | +++ | ++ | ++++ | +++ |
| 217 | ++++ | ++ | ++++ | +++ |
| 218 | ++++ | ++ | ++++ | +++ |
| 221 | ++++ | +++ | ++++ | +++ |
| 227 | ++++ | ++ | ++++ | +++ |
| 230 | ++++ | +++ | ++++ | ++++ |
| 232 | ++++ | ++ | ++++ | +++ |
| 233 | ++++ | +++ | ++++ | +++ |
| 236 | +++ | ++ | ++++ | +++ |
| 237 | +++ | ++ | ++++ | +++ |
| 238 | +++ | +++ | ++++ | +++ |
| 239 | +++ | ++ | +++ | +++ |
| 240 | +++ | ++ | ++++ | +++ |
| 241 | +++ | ++ | ++++ | +++ |
| 242 | +++ | ++ | ++++ | +++ |
| 243 | +++ | +++ | ++++ | +++ |
| 244 | +++ | +++ | ++++ | ++++ |
| 245 | +++ | +++ | ++++ | +++ |
| 246 | +++ | ++ | ++++ | +++ |
| 247 | +++ | +++ | ++++ | +++ |
| 248 | +++ | +++ | ++++ | +++ |
| 249 | +++ | +++ | ++++ | ++++ |
| 250 | ++ | + | ++ | + |
| 252 | ++ | + | ++ | + |
| 254 | +++ | ++ | ++++ | +++ |
| 255 | +++ | +++ | ++++ | +++ |
| 256 | +++ | +++ | ++++ | +++ |
| 257 | +++ | +++ | ++++ | +++ |
| 258 | +++ | ++ | ++++ | +++ |
| 259 | +++ | +++ | ++++ | +++ |
| 260 | +++ | +++ | ++++ | +++ |
| 261 | +++ | ++ | ++++ | +++ |
| 262 | +++ | ++ | ++++ | +++ |
| 263 | +++ | ++ | ++++ | +++ |
| 264 | +++ | +++ | ++++ | +++ |
| 266 | +++ | ++ | ++++ | +++ |
| 267 | +++ | +++ | ++++ | ++++ |
| 270 | ++++ | +++ | ++++ | +++ |
| 271 | ++++ | +++ | ++++ | ++++ |
| 272 | ++++ | +++ | ++++ | ++++ |
| 276 | +++ | +++ | ++++ | ++++ |
| 277 | +++ | +++ | ++++ | ++++ |
| 278 | +++ | +++ | ++++ | ++++ |
| 279 | ++++ | +++ | ++++ | +++ |
| 280 | +++ | ++ | ++++ | +++ |
| 281 | +++ | + | +++ | ++ |
| 282 | ++ | + | +++ | + |
| 283 | +++ | ++ | +++ | ++ |
| 284 | +++ | ++ | ++++ | +++ |
| 289 | +++ | +++ | ++++ | +++ |
| 291 | +++ | +++ | ++++ | ++++ |
| 293 | ++++ | +++ | ++++ | +++ |
| 306 | ++++ | ++ | ++++ | +++ |
| 308 | ++ | ++ | +++ | +++ |
| 310 | +++ | +++ | ++++ | +++ |
| 312 | +++ | ++ | +++ | +++ |
| 313 | ++++ | ++ | ++++ | +++ |
| 314 | ++++ | +++ | ++++ | ++++ |
| 315 | +++ | +++ | ++++ | +++ |
| 316 | ++++ | ++ | ++++ | +++ |
| 317 | +++ | ++ | +++ | +++ |
| 318 | +++ | ++ | +++ | +++ |
| 319 | +++ | ++ | +++ | ++ |
| 320 | +++ | ++ | +++ | ++ |
| 321 | +++ | ++ | ++++ | +++ |
| 322 | +++ | ++ | +++ | ++ |
| 323 | +++ | + | +++ | ++ |
| 328 | +++ | +++ | ++++ | +++ |
| 329 | +++ | +++ | ++++ | +++ |
| 331 | ++++ | +++ | ++++ | ++++ |
| 332 | ++++ | +++ | ++++ | ++++ |
| 334 | ++++ | +++ | ++++ | ++++ |
| 336 | ++++ | +++ | ++++ | ++++ |
| 339 | ++++ | ++ | ++++ | +++ |
| 341 | +++ | +++ | ++++ | ++++ |
| 343 | +++ | +++ | ++++ | ++++ |
| 347 | +++ | +++ | ++++ | +++ |
| 349 | ++++ | +++ | ++++ | ++++ |
| 351 | ++++ | +++ | ++++ | ++++ |
| 353 | ++++ | +++ | ++++ | ++++ |
| 355 | ++++ | +++ | ++++ | ++++ |
| 357 | ++++ | +++ | ++++ | ++++ |
| 359 | ++++ | +++ | ++++ | +++ |
| 360 | ++++ | ++++ | ++++ | ++++ |
| 363 | +++ | +++ | ++++ | ++++ |
| 364 | +++ | +++ | ++++ | ++++ |
| 365 | +++ | +++ | ++++ | ++++ |
| 366 | +++ | +++ | ++++ | +++ |
| 369 | ++ | ++ | +++ | +++ |
| 370 | +++ | +++ | ++++ | +++ |
| 371 | ++ | ++ | +++ | +++ |
| 372 | ++ | ++ | +++ | +++ |
| 373 | +++ | +++ | +++ | +++ |
| 374 | +++ | +++ | ++++ | ++++ |
| 375 | +++ | +++ | ++++ | ++++ |
| 376 | +++ | +++ | ++++ | ++++ |
| 377 | +++ | +++ | ++++ | +++ |
| 378 | +++ | +++ | ++++ | +++ |
| 379 | +++ | +++ | ++++ | +++ |
| 380 | +++ | +++ | ++++ | +++ |
| 381 | +++ | +++ | ++++ | +++ |
| 382 | +++ | +++ | ++++ | ++++ |
| 384 | ++ | + | ++ | + |
| 386 | ++ | + | ++ | + |
| 388 | ++ | +++ | +++ | ++++ |
| 390 | +++ | +++ | ++++ | +++ |
| 392 | +++ | +++ | ++++ | ++++ |
| 394 | ++++ | +++ | ++++ | ++++ |
| 396 | ++++ | ++++ | ++++ | ++++ |
| 398 | +++ | +++ | ++++ | +++ |
| 402 | ++++ | ++++ | ++++ | ++++ |
| 404 | +++ | +++ | ++++ | ++++ |
| 408 | +++ | +++ | ++++ | +++ |
| 410 | ++++ | ++++ | ++++ | ++++ |
| 411 | ++ | + | ++ | + |
| 412 | ++++ | +++ | ++++ | ++++ |
| 415 | ++++ | ++++ | ++++ | ++++ |
| 416 | +++ | +++ | ++++ | +++ |
| 417 | +++ | +++ | ++++ | +++ |
| 418 | ++++ | +++ | ++++ | ++++ |
| 419 | +++ | +++ | +++ | ++++ |
| 421 | ++++ | ++++ | ++++ | ++++ |
| 423 | +++ | +++ | ++++ | +++ |
| 425 | +++ | +++ | +++ | +++ |
| 427 | ++ | ++ | +++ | +++ |
| 432 | ++++ | +++ | ++++ | ++++ |
| 434 | +++ | +++ | ++++ | +++ |
| 435 | ++++ | +++ | ++++ | ++++ |
| 437 | +++ | +++ | ++++ | +++ |
| 439 | ++++ | +++ | ++++ | ++++ |
| 441 | ++++ | ++++ | ++++ | ++++ |
| 443 | +++ | +++ | ++++ | +++ |
| 445 | +++ | ++ | ++++ | +++ |
| 446 | +++ | + | ++++ | + |
| 447 | ++ | + | ++ | + |
| 551 | N/A | N/A | ++++ | +++ |
| 555 | N/A | N/A | ++++ | +++ |
| 556 | N/A | N/A | ++++ | +++ |
| 557 | N/A | N/A | +++ | +++ |
| 558 | N/A | N/A | +++ | +++ |
| 559 | N/A | N/A | +++ | +++ |
| 560 | N/A | N/A | + | + |
| 561 | N/A | N/A | ++++ | +++ |
| 562 | N/A | N/A | +++ | +++ |
| 563 | N/A | N/A | +++ | +++ |
| 564 | N/A | N/A | ++++ | +++ |
| 565 | N/A | N/A | +++ | +++ |
| 566 | N/A | N/A | ++++ | +++ |
| 567 | N/A | N/A | ++++ | +++ |
| 568 | N/A | N/A | ++++ | ++++ |
| 569 | N/A | N/A | ++++ | +++ |
| 570 | N/A | N/A | ++++ | +++ |
| 571 | N/A | N/A | ++++ | +++ |
| 572 | N/A | N/A | +++ | +++ |
| 573 | N/A | N/A | +++ | +++ |
| 574 | N/A | N/A | ++++ | +++ |
| 575 | N/A | N/A | ++++ | +++ |
| 576 | N/A | N/A | ++++ | +++ |
| 577 | N/A | N/A | ++++ | +++ |
| 578 | N/A | N/A | ++++ | +++ |
| 585 | N/A | N/A | +++ | +++ |
| 586 | N/A | N/A | ++++ | +++ |
| 587 | N/A | N/A | ++++ | ++++ |
| 589 | N/A | N/A | ++++ | |
| 594 | N/A | N/A | ++++ | ++++ |
| 596 | N/A | N/A | ++++ | +++ |
| 597 | N/A | N/A | ++++ | +++ |
| 598 | N/A | N/A | ++++ | +++ |
| 600 | N/A | N/A | ++++ | ++++ |
| 602 | N/A | N/A | ++++ | ++++ |
| 603 | N/A | N/A | ++++ | ++++ |
| 604 | N/A | N/A | +++ | +++ |
| 608 | N/A | N/A | ++++ | +++ |
| 609 | N/A | N/A | ++++ | +++ |
| 610 | N/A | N/A | ++++ | +++ |
| 611 | N/A | N/A | ++++ | +++ |
| 612 | N/A | N/A | ++++ | +++ |
| 613 | N/A | N/A | ++++ | +++ |
| 615 | N/A | N/A | ++++ | ++++ |
| 433 | N/A | N/A | ++++ | +++ |
| 686 | N/A | N/A | ++++ | +++ |
| 687 | N/A | N/A | ++ | ++ |
| 595 | N/A | N/A | + | N/A |
| 665 | N/A | N/A | +++ | N/A |
| 708 | N/A | N/A | +++ | +++ |
| 710 | N/A | N/A | +++ | +++ |
| 711 | N/A | N/A | +++ | ++ |
| 712 | N/A | N/A | ++++ | ++++ |
| 713 | N/A | N/A | ++++ | ++++ |
| 716 | N/A | N/A | ++++ | ++++ |
| 765 | + | + | | |
| 766 | +++ | + | | |
| 752 | ++ | + | | |
| 753 | +++ | + | | |
| 754 | ++ | + | | |
| 755 | ++++ | + | | |
| 756 | +++ | + | | |
| 757 | ++++ | + | | |
| 758 | +++ | + | | |

### Example 11: Competition Binding ELISA Assay for MDM2 and MDMX

[0675] p53-His6 protein (30 nM/well) was coated overnight at room temperature in the wells of 96-well plates. On the day of the experiment, the plates were washed with 1×PBS-Tween 20 (0.05%) using an automated ELISA plate washer, and blocked with ELISA microwell blocking buffer for 30 minutes at room temperature. The excess blocking agent was washed off by washing the plates with 1×PBS-Tween 20 (0.05%). The peptides were diluted from 10 mM DMSO stock solutions to 500 μM working stock solutions using sterile water. Further dilutions were made in 0.5% DMSO to keep the concentration of DMSO constant across the samples. The peptide solutions were added to the wells at 2× the desired concentrations in 50 μL volumes, followed by addition of diluted GST-MDM2 or GST-HMDX protein (final concentration: 10 nM). The samples were incubated at room temperature for 2 h, and the plates were washed with PBS-Tween 20 (0.05%) prior to adding 100 μL of HRP-conjugated anti-GST antibody diluted to 0.5 μg/ml in HRP-stabilizing buffer. The plates were incubated with a detection antibody for 30 min, and the plates were washed and incubated with 100 μL per well of TMB-E substrate solution for up to 30 minutes. The reactions were stopped using 1M HCL, and absorbance was measured at 450 nm using a micro plate reader. The data were analyzed using Graph Pad PRISM software.

### Example 12: Cell Viability Assay

[0676] Cells were trypsinized, counted, and seeded at pre-determined densities in 96-well plates one day prior to conducting the cell viability assay. The following cell densities were used for each cell line: SJSA-1: 7500 cells/well; RKO: 5000 cells/well; RKO-E6: 5000 cells/well; HCT-116: 5000 cells/well; SW-480: 2000 cells/well; and MCF-7: 5000 cells/well. On the day of cell viability assay, the media was replaced with fresh media containing 11% FBS (assay media) at room temperature. 180 μL of the assay media was added to each well. Control wells were prepared with no cells, and the control wells received 200 μL of media.

[0677] Peptide dilutions were made at room temperature, and the diluted peptide solutions were added to the cells at room temperature. 10 mM stock solutions of the peptides were prepared in DMSO. The stock solutions were serially diluted using a 1:3 dilution scheme to obtain 10 mM, 3.3 mM, 1.1 mM, 0.33 mM, 0.11 mM, 0.03 mM, and 0.01 mM solutions in DMSO. The serially DMSO-diluted peptides were diluted 33.3 times using sterile water, resulting in a range of 10× working stock solutions. A DMSO/sterile water (3% DMSO) solution was prepared for use in the control well. The working stock solution concentrations ranges were 300 μM, 100 μM, 30 μM, 10 μM, 3 μM, 1 μM, 0.3 μM, and 0 μM. The solutions were mixed well at each dilution step using a multichannel pipette.

[0678] Row H of the plate contained the controls. Wells H1-H3 received 20 μL of assay media. Rows H4-H9 received 20 μL of the 3% DMSO-water vehicle. Wells H10-H12 received media alone control with no cells. The MDM2 small molecule inhibitor Nutlin-3a (10 mM) was used as a positive control. Nutlin-3a was diluted using the same dilution scheme used for the peptides.

[0679] 20 μL of a 10× concentration peptide stock solution was added to the appropriate well to achieve the final concentration in 200 μL in each well. For example, 20 μL of 300 μM peptide solution+180 μL of cells in media=30 μM final concentration in 200 μL volume in wells. The solution was mixed gently a few times using a pipette. The final concentration range was 30 μM, 10 μM, 3 μM, 1 μM, 0.3 μM, 0.1 μM, 0.03 μM, and 0 μM. Further dilutions were used for potent peptides. Controls included wells that received no peptides, but contained the same concentration of DMSO as the wells containing peptides and wells containing no cells. The plates were incubated for 72 hours at 37° C. in a humidified 5% CO₂ atmosphere.

[0680] The viability of the cells was determined using MTT reagent. The viability of SJSA-1, RKO, RKO-E6, HCT-116 cells was determined on day 3. The viability of MCF-7 cells was determined on day 5. The viability of SW-480 cells was determined on on day 6. At the end of the designated incubation time, the plates were cooled to room temperature. 80 μL of assay media was removed from each well. 15 μL of thawed MTT reagent was then added to each well. The plate was incubated for 2 h at 37° C. in a humidified 5% CO₂ atmosphere. 100 μL of the solubilization reagent was added to each well. The plates were incubated with agitation for 1 h at room temperature, and read using a multiplate reader for absorbance at 570 nM. Cell viability was analyzed against the DMSO controls.

[0681] Results from cell viability assays are shown in TABLE 5 and TABLE 6. “+” represents a value greater than 30 μM, “++” represents a value greater than 15 μM and less than or equal to 30 M, “+++” represents a value greater than 5 μM and less than or equal to 15 μM, and “++++” represents a value of less than or equal to 5 μM. “IC₅₀ ratio” represents the ratio of average IC₅₀ in p53+/+ cells relative to average IC₅₀ in p53−/− cells.

TABLE 5

| | SJSA-1 EC50 |
|---|---|
| SP# | (72 h) |
| 3 | +++ |
| 4 | +++ |
| 5 | ++++ |
| 6 | ++ |
| 7 | ++++ |
| 8 | +++ |
| 9 | +++ |
| 10 | +++ |
| 11 | ++++ |
| 12 | ++ |
| 13 | +++ |
| 14 | + |
| 15 | ++ |
| 16 | + |
| 17 | + |
| 18 | + |
| 19 | ++ |
| 20 | + |
| 21 | + |
| 22 | + |
| 24 | +++ |
| 26 | ++++ |
| 28 | + |
| 29 | + |
| 30 | + |
| 32 | ++ |
| 38 | + |
| 39 | + |
| 40 | + |
| 41 | + |
| 42 | + |
| 43 | ++ |
| 45 | + |
| 46 | + |
| 47 | + |
| 48 | + |
| 49 | +++ |
| 50 | ++++ |
| 52 | + |
| 54 | + |
| 55 | + |
| 65 | ++++ |
| 68 | ++++ |
| 69 | ++++ |
| 70 | ++++ |
| 71 | ++++ |
| 72 | ++++ |
| 74 | ++++ |
| 75 | ++++ |
| 77 | ++++ |
| 78 | ++ |
| 80 | ++++ |
| 81 | +++ |
| 82 | +++ |
| 83 | +++ |
| 84 | + |
| 85 | +++ |
| 99 | ++++ |
| 102 | +++ |
| 103 | +++ |
| 104 | +++ |
| 105 | +++ |
| 108 | +++ |
| 109 | +++ |
| 110 | +++ |
| 111 | ++ |
| 114 | ++++ |
| 115 | ++++ |
| 118 | ++++ |
| 120 | ++++ |
| 121 | ++++ |
| 122 | ++++ |
| 123 | ++++ |
| 124 | +++ |
| 125 | ++++ |
| 126 | ++++ |
| 127 | ++++ |
| 128 | +++ |
| 129 | ++ |
| 130 | ++++ |
| 131 | +++ |
| 132 | ++++ |
| 133 | +++ |
| 134 | +++ |
| 135 | +++ |
| 136 | ++ |
| 137 | +++ |
| 139 | ++++ |
| 142 | +++ |
| 144 | ++++ |
| 147 | ++++ |
| 148 | ++++ |
| 149 | ++++ |
| 150 | ++++ |
| 152 | +++ |
| 153 | ++++ |
| 154 | ++++ |
| 155 | ++ |
| 156 | +++ |
| 157 | +++ |
| 158 | +++ |
| 160 | ++++ |
| 161 | ++++ |
| 162 | +++ |
| 163 | +++ |
| 166 | ++ |
| 167 | +++ |
| 168 | ++ |
| 169 | ++++ |
| 170 | ++++ |
| 171 | ++ |
| 173 | +++ |
| 174 | ++++ |
| 175 | +++ |
| 176 | +++ |
| 177 | ++++ |
| 179 | +++ |
| 180 | +++ |
| 181 | +++ |
| 182 | ++++ |
| 183 | ++++ |
| 184 | +++ |
| 185 | +++ |
| 186 | ++ |
| 188 | ++ |
| 190 | ++++ |
| 192 | +++ |
| 193 | ++ |
| 194 | + |
| 195 | ++++ |
| 196 | ++++ |
| 197 | ++++ |
| 198 | ++ |
| 199 | +++ |
| 200 | +++ |
| 201 | ++++ |
| 202 | +++ |
| 203 | ++++ |
| 204 | ++++ |
| 205 | ++ |
| 206 | ++ |
| 207 | +++ |
| 208 | +++ |
| 209 | ++++ |
| 210 | +++ |
| 211 | ++++ |
| 213 | ++++ |
| 214 | ++++ |
| 215 | ++++ |
| 216 | ++++ |
| 217 | ++++ |
| 218 | ++++ |
| 219 | ++++ |
| 220 | +++ |
| 221 | ++++ |
| 222 | +++ |
| 223 | ++++ |
| 224 | ++ |
| 225 | +++ |
| 226 | ++ |
| 227 | +++ |
| 228 | ++++ |
| 229 | ++++ |
| 230 | ++++ |
| 231 | ++++ |
| 232 | ++++ |
| 233 | ++++ |
| 234 | ++++ |
| 235 | ++++ |
| 236 | ++++ |
| 237 | ++++ |
| 238 | ++++ |
| 239 | +++ |
| 240 | ++ |
| 241 | +++ |
| 242 | ++++ |
| 243 | ++++ |
| 244 | ++++ |
| 245 | ++++ |
| 246 | +++ |
| 247 | ++++ |
| 248 | ++++ |
| 249 | ++++ |
| 250 | ++ |
| 251 | + |
| 252 | + |
| 253 | + |
| 254 | +++ |
| 255 | +++ |
| 256 | ++ |
| 257 | +++ |
| 258 | +++ |
| 259 | ++ |
| 260 | ++ |
| 261 | ++ |
| 262 | +++ |
| 263 | ++ |
| 264 | ++++ |
| 266 | +++ |
| 267 | ++++ |
| 270 | ++ |
| 271 | ++ |
| 272 | ++ |
| 276 | ++ |
| 277 | ++ |
| 278 | ++ |
| 279 | ++++ |
| 280 | +++ |
| 281 | ++ |
| 282 | ++ |
| 283 | ++ |
| 284 | ++++ |
| 289 | ++++ |
| 290 | +++ |
| 291 | ++++ |
| 292 | ++++ |
| 293 | ++++ |
| 294 | ++++ |
| 295 | +++ |
| 296 | ++++ |
| 297 | +++ |
| 298 | ++++ |
| 300 | ++++ |
| 301 | ++++ |
| 302 | ++++ |
| 303 | ++++ |
| 304 | ++++ |
| 305 | ++++ |
| 306 | ++++ |
| 307 | +++ |
| 308 | ++++ |
| 309 | +++ |
| 310 | ++++ |
| 312 | ++++ |
| 313 | ++++ |
| 314 | ++++ |
| 315 | ++++ |
| 316 | ++++ |
| 317 | ++++ |
| 318 | ++++ |
| 319 | ++++ |
| 320 | ++++ |
| 321 | ++++ |
| 322 | ++++ |
| 323 | ++++ |
| 324 | ++++ |
| 326 | ++++ |
| 327 | ++++ |
| 328 | ++++ |
| 329 | ++++ |
| 330 | ++++ |
| 331 | ++++ |
| 332 | ++++ |
| 333 | ++ |
| 334 | +++ |
| 335 | ++++ |
| 336 | ++++ |
| 337 | ++++ |
| 338 | ++++ |
| 339 | ++++ |
| 340 | ++++ |
| 341 | ++++ |
| 342 | ++++ |
| 343 | ++++ |
| 344 | ++++ |
| 345 | ++++ |
| 346 | ++++ |
| 347 | ++++ |
| 348 | ++++ |
| 349 | ++++ |
| 350 | ++++ |
| 351 | ++++ |
| 352 | ++++ |
| 353 | ++++ |
| 355 | ++++ |
| 357 | ++++ |
| 358 | ++++ |
| 359 | ++++ |
| 360 | ++++ |
| 361 | +++ |
| 362 | ++++ |
| 363 | ++++ |
| 364 | ++++ |
| 365 | +++ |
| 366 | ++++ |
| 367 | ++++ |
| 368 | + |
| 369 | ++++ |
| 370 | ++++ |
| 371 | ++++ |
| 372 | +++ |
| 373 | +++ |
| 374 | ++++ |
| 375 | ++++ |
| 376 | ++++ |
| 377 | ++++ |
| 378 | ++++ |
| 379 | ++++ |
| 380 | ++++ |
| 381 | ++++ |
| 382 | ++++ |
| 386 | +++ |
| 388 | ++ |
| 390 | ++++ |
| 392 | +++ |
| 394 | +++ |
| 396 | +++ |
| 398 | +++ |
| 402 | +++ |
| 404 | +++ |
| 408 | ++++ |
| 410 | +++ |
| 411 | +++ |
| 412 | + |
| 421 | +++ |
| 423 | ++++ |
| 425 | ++++ |
| 427 | ++++ |
| 434 | +++ |
| 435 | ++++ |
| 436 | ++++ |
| 437 | ++++ |
| 438 | ++++ |
| 439 | ++++ |
| 440 | ++++ |
| 441 | ++++ |
| 442 | ++++ |
| 443 | ++++ |
| 444 | +++ |
| 445 | ++++ |
| 449 | ++++ |
| 551 | ++++ |
| 552 | ++++ |
| 554 | + |
| 555 | ++++ |
| 586 | ++++ |
| 587 | ++++ |
| 588 | ++++ |
| 589 | +++ |
| 432 | ++++ |
| 672 | + |
| 673 | ++ |
| 682 | + |
| 686 | + |
| 557 | ++++ |
| 558 | ++++ |
| 560 | + |
| 561 | ++++ |
| 562 | ++++ |
| 563 | ++++ |
| 564 | ++++ |
| 566 | ++++ |
| 567 | ++++ |
| 568 | +++ |
| 569 | ++++ |
| 571 | ++++ |
| 572 | ++++ |
| 573 | ++++ |
| 574 | ++++ |
| 575 | ++++ |
| 576 | ++++ |
| 577 | ++++ |
| 578 | ++++ |
| 585 | ++++ |
| 687 | + |
| 662 | ++++ |
| 663 | ++++ |
| 553 | +++ |
| 559 | ++++ |
| 579 | ++++ |
| 581 | ++++ |
| 582 | ++ |
| 582 | ++++ |
| 584 | +++ |
| 675 | ++++ |
| 676 | ++++ |
| 677 | + |
| 679 | ++++ |
| 700 | +++ |
| 704 | +++ |
| 591 | + |
| 706 | ++ |
| 695 | ++ |
| 595 | ++++ |
| 596 | ++++ |
| 597 | +++ |
| 598 | +++ |
| 599 | ++++ |
| 600 | ++++ |
| 601 | +++ |
| 602 | +++ |
| 603 | +++ |
| 604 | +++ |
| 606 | ++++ |
| 607 | ++++ |
| 608 | ++++ |
| 610 | ++++ |
| 611 | ++++ |
| 612 | ++++ |
| 613 | +++ |
| 614 | +++ |
| 615 | ++++ |
| 618 | ++++ |
| 619 | ++++ |
| 707 | ++++ |
| 620 | ++++ |
| 621 | ++++ |
| 622 | ++++ |
| 623 | ++++ |
| 624 | ++++ |
| 625 | ++++ |
| 626 | +++ |
| 631 | ++++ |
| 633 | ++++ |
| 634 | ++++ |
| 635 | +++ |
| 636 | +++ |
| 638 | + |
| 641 | +++ |
| 665 | ++++ |
| 708 | ++++ |
| 709 | +++ |
| 710 | + |
| 711 | ++++ |
| 712 | ++++ |
| 713 | ++++ |
| 714 | +++ |
| 715 | +++ |
| 716 | ++++ |
| 765 | + |
| 753 | + |
| 754 | + |
| 755 | + |
| 756 | + |
| 757 | ++++ |
| 758 | +++ |

TABLE 6

| | | | | SW480 | |
|---|---|---|---|---|---|
| | HCT-116 EC50 | RKO EC₅₀ | RKO-E6 EC₅₀ | EC50 | IC₅₀ |
| SP# | (72 h) | (72 h) | (72 h) | (6 days) | Ratio |
| 4 | ++++ | ++++ | +++ | ++++ | |
| 5 | ++++ | ++++ | +++ | ++++ | |
| 7 | ++++ | ++++ | +++ | ++++ | |
| 10 | ++++ | +++ | +++ | +++ | |
| 11 | ++++ | ++++ | ++ | +++ | |
| 50 | ++++ | ++++ | ++ | +++ | |
| 65 | +++ | +++ | +++ | +++ | |
| 69 | ++++ | ++++ | + | ++++ | |
| 70 | ++++ | ++++ | ++ | +++ | |
| 71 | ++++ | ++++ | +++ | +++ | |
| 81 | +++ | +++ | +++ | +++ | |
| 99 | ++++ | ++++ | +++ | ++++ | |
| 109 | ++++ | ++++ | ++ | +++ | |
| 114 | | +++ | + | +++ | |
| 115 | | +++ | + | +++ | 1-29 |
| 118 | +++ | ++++ | + | ++++ | |
| 120 | ++++ | ++++ | + | ++++ | |
| 121 | ++++ | ++++ | + | ++++ | |
| 122 | | +++ | + | +++ | 1-29 |
| 125 | +++ | +++ | + | + | |
| 126 | + | + | + | + | |
| 148 | | ++ | + | + | |
| 150 | | ++ | + | + | |
| 153 | +++ | | + | | |
| 154 | +++ | +++ | + | + | 30-49 |
| 158 | + | + | + | + | |
| 160 | +++ | + | + | + | 1-29 |
| 161 | +++ | + | + | + | |
| 175 | + | + | + | + | |
| 196 | ++++ | ++++ | +++ | ++++ | |
| 219 | ++++ | +++ | + | + | 1-29 |
| 233 | ++++ | | | | |
| 237 | ++++ | | + | + | |
| 238 | ++++ | | + | + | |
| 243 | ++++ | | + | + | |
| 244 | ++++ | | + | + | ≥50 |
| 245 | ++++ | | + | + | |
| 247 | ++++ | | + | + | |
| 249 | ++++ | ++++ | + | + | ≥50 |
| 255 | ++++ | | + | | |
| 291 | | | + | | |
| 293 | +++ | | + | | |
| 303 | +++ | | + | | 1-29 |
| 305 | | | + | | |
| 306 | ++++ | | + | | |
| 310 | ++++ | | + | | |
| 312 | ++++ | | | | |
| 313 | ++++ | | ++ | | |
| 314 | | | + | | |
| 315 | ++++ | ++++ | ++ | ++++ | ≥50 |
| 316 | ++++ | ++++ | + | +++ | ≥50 |
| 317 | +++ | | + | ++ | |
| 321 | ++++ | | + | | |
| 324 | +++ | | + | | |
| 325 | +++ | | | | |
| 326 | +++ | | + | | |
| 327 | +++ | | + | | |
| 328 | +++ | | ++ | | |
| 329 | ++++ | | + | | |
| 330 | | | + | | |
| 331 | ++++ | ++++ | + | + | ≥50 |
| 338 | ++++ | ++++ | ++ | +++ | |
| 341 | +++ | ++ | + | + | |
| 343 | +++ | | + | + | |
| 346 | ++++ | | + | + | |
| 347 | +++ | | + | + | |
| 349 | ++++ | +++ | + | + | 30-49 |
| 350 | ++++ | | + | + | |
| 351 | ++++ | +++ | + | + | 30-49 |
| 353 | ++ | ++ | + | + | |
| 355 | ++++ | ++ | + | + | 1-29 |
| 357 | ++++ | ++++ | + | + | |
| 358 | ++++ | ++ | + | + | |
| 359 | ++++ | ++ | + | + | |
| 367 | ++++ | | + | + | 30-49 |
| 386 | ++++ | ++++ | ++++ | ++++ | |
| 388 | ++ | ++ | + | +++ | 1-29 |
| 390 | ++++ | ++++ | +++ | ++++ | |
| 435 | +++ | ++ | + | | |
| 436 | ++++ | ++++ | ++ | | |
| 437 | ++++ | ++++ | ++ | ++++ | 30-49 |
| 440 | ++ | ++ | + | | |
| 442 | ++++ | ++++ | ++ | | |
| 444 | ++++ | ++++ | +++ | | |
| 445 | ++++ | +++ | + | + | ≥50 |
| 555 | | | | | ≥50 |
| 557 | | | | | ≥50 |
| 558 | | | | | 30-49 |
| 562 | | | | | 30-49 |
| 564 | | | | | 30-49 |
| 566 | | | | | 30-49 |
| 567 | | | | | ≥50 |
| 572 | | | | | ≥50 |
| 573 | | | | | 30-49 |
| 578 | | | | | 30-49 |
| 662 | | | | | ≥50 |
| 379 | | | | | 1-29 |
| 375 | | | | | 1-29 |
| 559 | | | | | ≥50 |
| 561 | | | | | 1-29 |
| 563 | | | | | 1-29 |
| 568 | | | | | 1-29 |
| 569 | | | | | 1-29 |
| 571 | | | | | 1-29 |
| 574 | | | | | 1-29 |
| 575 | | | | | 1-29 |
| 576 | | | | | 1-29 |
| 577 | | | | | 30-49 |
| 433 | | | | | 1-29 |
| 551 | | | | | 30-49 |
| 553 | | | | | 1-29 |
| 710 | | | | + | |
| 711 | | | | + | |
| 712 | | | | ++ | |
| 713 | | | | ++ | |
| 714 | | | | +++ | |
| 715 | | | | +++ | |
| 716 | | | | + | |

### Example 13: p21 ELISA Assay

[0682] SJSA-1 cells were trypsinized, counted, and seeded at a density of 7500 cells/100 μL/well in 96-well plates one day prior to running the assay. On the day of the assay, the media was replaced with fresh RPMI-11% FBS assay media. 90 μL of the assay media was added to each well. The control wells contained no cells and received 100 μL of the assay media.

[0683] 10 mM stock solutions of the peptides were prepared in DMSO. The stock solutions were serially diluted using a 1:3 dilution scheme to obtain 10 mM, 3.3 mM, 1.1 mM, 0.33 mM, 0.11 mM, 0.03 mM, and 0.01 mM solutions in DMSO. The solutions were serially diluted 33.3 times using sterile water to provide a range of 10× working stock solutions. A DMSO/sterile water (3% DMSO) solution was prepared for use in the control wells. The working stock solution concentration range was 300 μM, 100 μM, 30 μM, 10 μM, 3 μM, 1 μM, 0.3 μM, and 0 μM. Each solution was mixed well at each dilution step using a multichannel pipette. Row H contained the control wells. Wells H1-H3 received 10 μL of the assay media. Wells H4-H9 received 10 μL of the 3% DMSO-water solution. Wells H10-H12 received media alone and contained no cells. The MDM2 small molecule inhibitor Nutlin-3a (10 mM) was used as a positive control. Nutlin-3a was diluted using the same dilution scheme used for the peptides.

[0684] 10 μL of a 10× peptide solution was added to the appropriate well to achieve a final concentration in a volume of 100 μL. For example, 10 μL of 300 μM peptide+90 μL of cells in media=30 μM final concentration in 100 μL volume in wells. The final concentration range used was 30 μM, 10 μM, 3 μM, 1 μM, 0.3 μM, and 0 μM. Control wells included wells that did not receive peptides but contained the same concentration of DMSO as the wells containing the peptides and wells containing no cells.

[0685] 20 h after incubation, the media was aspirated from the wells. The cells were washed with 1×PBS (without Ca⁺⁺/Mg⁺⁺) and lysed in 60 μL of 1× cell lysis buffer (10× buffer diluted to 1× and supplemented with protease inhibitors and phosphatase inhibitors) on ice for 30 min. The plates were centrifuged at 5000 rpm at 4° C. for 8 min. The clear supernatants were collected and frozen at −80° C. until further use. The total protein contents of the lysates were measured using a BCA protein detection kit and BSA standards. Each well provided about 6-7 μg of protein. 50 μL of the lysate was used per well to set up the p21 ELISA assay. For the human total p21 ELISA assay, 50 μL of lysate was used for each well, and each well was set up in triplicate.

### Example 14: Caspase 3 Detection Assay

[0686] SJSA-1 cells were trypsinized, counted, and seeded at a density of 7500 cells/100 μL/well in 96-well plates one day prior to conducting the assay. One the day of the assay, the media was replaced with fresh RPMI-11% FBS assay media. 180 μL of the assay media was added to each well. Control wells contained no cells, and received 200 μL of the assay media.

[0687] 10 mM stock solutions of the peptides were prepared in DMSO. The stock solutions were serially diluted using a 1:3 dilution scheme to obtain 10 mM, 3.3 mM, 1.1 mM, 0.33 mM, 0.11 mM, 0.03 mM, and 0.01 mM solutions in DMSO. The solutions were serially diluted 33.3 times using sterile water to provide a range of 10× working stock solutions. A DMSO/sterile water (3% DMSO) solution was prepared for use in the control wells. The working stock solution concentration range was 300 μM, 100 μM, 30 μM, 10 μM, 3 μM, 1 μM, 0.3 μM, and 0 μM. Each well was mixed well at each dilution step using a multichannel pipette. 20 μL of the 10× working stock solutions were added to the appropriate wells. Row H of the plates had control wells. Wells H1-H3 received 20 μL of the assay media. Wells H4-H9 received 20 μL of the 3% DMSO-water solutions. Wells H10-H12 received media and had no cells. The MDM2 small molecule inhibitor Nutlin-3a (10 mM) was used as a positive control. Nutlin-3a was diluted using the same dilution scheme as the peptides.

[0688] 10 μL of the 10× stock solutions were added to the appropriate wells to achieve the final concentrations in a total volume of 100 μL. For example, 10 μL of 300 μM peptide+90 μL of cells in media=30 μM final concentration in 100 μL volume in wells. The final concentration range used was 30 μM, 10 μM, 3 μM, 1 μM, 0.3 μM, and 0 μM. Control wells contained no peptides but contained the same concentration of DMSO as the wells containing the peptides and well containing no cells. 48 h after incubation, 80 μL of the media was aspirated from each well. 100 μL of Caspase 3/7Glo assay reagent was added to each well. The plates were incubated with gentle shaking for 1 h at room temperature and read using a multi-plate reader for luminescence. Data were analyzed as Caspase 3 activation over DMSO-treated cells. Results from EXAMPLE 13 and EXAMPLE 14 are shown in TABLE 7.

TABLE 7

| | caspase | caspase | caspase | caspase | caspase | p21 | p21 | p21 | p21 | p21 |
|---|---|---|---|---|---|---|---|---|---|---|
| SP# | 0.3 μM | 1 μM | 3 μM | 10 μM | 30 μM | 0.3 μM | 1 μM | 3 μM | 10 μM | 30 μM |
| 4 | | | 9 | 37 | 35 | | | 317 | 3049 | 3257 |
| 7 | 0.93 | 1.4 | 5.08 | 21.7 | 23.96 | | 18 | 368 | 1687 | 2306 |
| 8 | | | 1 | 19 | 25 | | | 34 | 972 | 2857 |
| 10 | 1 | | 1 | 17 | 32 | | 10 | 89 | 970 | 2250 |
| 11 | 1 | | 5 | 23 | 33.5 | | 140 | 350 | 2075.5 | 3154 |
| 26 | 1 | | 1 | 3 | 14 | | | | | |
| 50 | | | 8 | 29 | 29 | | 44 | 646 | 1923 | 1818 |
| 65 | 1 | | 6 | 28 | 34 | −69 | −24 | 122 | 843 | 1472 |
| 69 | 4.34 | 9.51 | 16.39 | 26.59 | 26.11 | 272 | 458.72 | 1281.39 | 2138.88 | 1447.22 |
| 70 | | | 1 | 9 | 26 | | −19 | 68 | 828 | 1871 |
| 71 | 0.95 | 1.02 | 3.68 | 14.72 | 23.52 | | 95 | 101 | 1204 | 2075 |
| 72 | 1 | | 1 | 4 | 10 | −19 | 57 | 282 | 772 | 1045 |
| 77 | 1 | | 2 | 19 | 23 | | | | | |
| 80 | 1 | | 2 | 13 | 20 | | | | | |
| 81 | 1 | | 1 | 6 | 21 | | 0 | 0 | 417 | 1649 |
| 99 | 1 | | 7 | 31 | 33 | −19 | 117 | 370 | 996 | 1398 |
| 109 | | | 4 | 16 | 25 | | 161 | 445 | 1221 | 1680 |
| 114 | 1 | | 6 | 28 | 34 | −21 | 11 | 116 | 742 | 910 |
| 115 | 1 | | 10 | 26 | 32 | −10 | 36 | 315 | 832 | 1020 |
| 118 | 1 | | 2 | 18 | 27 | −76 | −62 | −11 | 581 | 1270 |
| 120 | 2 | | 11 | 20 | 30 | −4 | 30 | 164 | 756 | 1349 |
| 121 | 1 | | 5 | 19 | 30 | 9 | 33 | 81 | 626 | 1251 |
| 122 | 1 | | 2 | 15 | 30 | −39 | −18 | 59 | 554 | 1289 |
| 123 | 1 | | 1 | 6 | 14 | | | | | |
| 125 | 1 | | 3 | 9 | 29 | 50 | 104 | 196 | 353 | 1222 |
| 126 | 1 | | 1 | 6 | 30 | −47 | −10 | 90 | 397 | 1443 |
| 127 | 1 | | 1 | 4 | 13 | | | | | |
| 130 | 1 | | 2 | 6 | 17 | | | | | |
| 139 | 1 | | 2 | 9 | 18 | | | | | |
| 142 | 1 | | 2 | 15 | 20 | | | | | |
| 144 | 1 | | 4 | 10 | 16 | | | | | |
| 148 | 1 | | 11 | 23 | 31 | −23 | 55 | 295 | 666 | 820 |
| 149 | 1 | | 2 | 4 | 10 | 35 | 331 | 601 | 1164 | 1540 |
| 150 | 2 | | 11 | 19 | 35 | −37 | 24 | 294 | 895 | 906 |
| 153 | 2 | | 10 | 15 | 20 | | | | | |
| 154 | 2.68 | 4 | 13.93 | 19.86 | 30.14 | 414.04 | 837.45 | 1622.42 | 2149.51 | 2156.98 |
| 158 | 1 | | 1.67 | 5 | 16.33 | −1.5 | 95 | 209.5 | 654 | 1665.5 |
| 160 | 2 | | 10 | 16 | 31 | −43 | 46 | 373 | 814 | 1334 |
| 161 | 2 | | 8 | 14 | 22 | 13 | 128 | 331 | 619 | 1078 |
| 170 | 1 | | 1 | 16 | 20 | | | | | |
| 175 | 1 | | 5 | 12 | 21 | −65 | 1 | 149 | 543 | 1107 |
| 177 | 1 | | 1 | 8 | 20 | | | | | |
| 183 | 1 | | 1 | 4 | 8 | −132 | −119 | −14 | 1002 | 818 |
| 196 | 1 | | 4 | 33 | 26 | −49 | −1 | 214 | 1715 | 687 |
| 197 | 1 | | 1 | 10 | 20 | | | | | |
| 203 | 1 | | 3 | 12 | 10 | 77 | 329 | 534 | 1805 | 380 |
| 204 | 1 | | 4 | 10 | 10 | 3 | 337 | 928 | 1435 | 269 |
| 218 | 1 | | 2 | 8 | 18 | | | | | |
| 219 | 1 | | 5 | 17 | 34 | 28 | 53 | 289 | 884 | 1435 |
| 221 | 1 | | 3 | 6 | 12 | 127 | 339 | 923 | 1694 | 1701 |
| 223 | 1 | | 1 | 5 | 18 | | | | | |
| 230 | 1 | | 2 | 3 | 11 | 245.5 | 392 | 882 | 1549 | 2086 |
| 233 | 6 | 8 | 17 | 22 | 23 | 2000 | 2489 | 3528 | 3689 | 2481 |
| 237 | 1 | | 5 | 9 | 15 | 0 | 0 | 2 | 284 | 421 |
| 238 | 1 | | 2 | 4 | 21 | 0 | 149 | 128 | 825 | 2066 |
| 242 | 1 | | 4 | 5 | 18 | 0 | 0 | 35 | 577 | 595 |
| 243 | 1 | | 2 | 5 | 23 | 0 | 0 | 0 | 456 | 615 |
| 244 | 1 | | 2 | 7 | 17 | 0 | 178 | 190 | 708 | 1112 |
| 245 | 1 | | 3 | 9 | 16 | 0 | 0 | 0 | 368 | 536 |
| 247 | 1 | | 3 | 11 | 24 | 0 | 0 | 49 | 492 | 699 |
| 248 | | | | | | 0 | 50 | 22 | 174 | 1919 |
| 249 | 2 | | 5 | 11 | 23 | 0 | 0 | 100 | 907 | 1076 |
| 251 | | | | | | 0 | 0 | 0 | 0 | 0 |
| 252 | | | | | | 0 | 0 | 0 | 0 | 0 |
| 253 | | | | | | 0 | 0 | 0 | 0 | 0 |
| 254 | 1 | 3 | 7 | 14 | 22 | 118 | 896 | 1774 | 3042 | 3035 |
| 286 | 1 | 4 | 11 | 20 | 22 | 481 | 1351 | 2882 | 3383 | 2479 |
| 287 | 1 | 1 | 3 | 11 | 23 | 97 | 398 | 986 | 2828 | 3410 |
| 315 | 11 | 14.5 | 25.5 | 32 | 34 | 2110 | 2209 | 2626 | 2965 | 2635 |
| 316 | 6.5 | 10.5 | 21 | 32 | 32.5 | 1319 | 1718 | 2848 | 2918 | 2540 |
| 317 | 3 | 4 | 9 | 26 | 35 | 551 | 624 | 776 | 1367 | 1076 |
| 331 | 4.5 | 8 | 11 | 14.5 | 30.5 | 1510 | 1649 | 2027 | 2319 | 2509 |
| 338 | 1 | 5 | 23 | 20 | 29 | 660.37 | 1625.38 | 3365.87 | 2897.62 | 2727 |
| 341 | 3 | 8 | 11 | 14 | 21 | 1325.62 | 1873 | 2039.75 | 2360.75 | 2574 |
| 343 | 1 | 1 | 2 | 5 | 29 | 262 | 281 | 450 | 570 | 1199 |
| 346 | | | | | | 235.86 | 339.82 | 620.36 | 829.32 | 1695.78 |
| 347 | 2 | 3 | 5 | 8 | 29 | 374 | 622 | 659 | 905 | 1567 |
| 349 | 1 | 8 | 11 | 16 | 24 | 1039.5 | 1598.88 | 1983.75 | 2191.25 | 2576.38 |
| 351 | 3 | 9 | 13 | 15 | 24 | 1350.67 | 1710.67 | 2030.92 | 2190.67 | 2668.54 |
| 353 | 1 | 2 | 5 | 7 | 30 | 390 | 490 | 709 | 931 | 1483 |
| 355 | 1 | 4 | 11 | 13 | 30 | 191 | 688 | 1122 | 1223 | 1519 |
| 357 | 2 | 7 | 11 | 15 | 23 | 539 | 777 | 1080 | 1362 | 1177 |
| 358 | 1 | 2 | 3 | 6 | 24 | 252 | 321 | 434 | 609 | 1192 |
| 359 | 3 | 9 | 11 | 13 | 23 | 1163.29 | 1508.79 | 1780.29 | 2067.67 | 2479.29 |
| 416 | | | | | | 33.74 | 39.82 | 56.57 | 86.78 | 1275.28 |
| 417 | | | | | | 0 | 0 | 101.13 | 639.04 | 2016.58 |
| 419 | | | | | | 58.28 | 97.36 | 221.65 | 1520.69 | 2187.94 |
| 432 | | | | | | 54.86 | 68.86 | 105.11 | 440.28 | 1594.4 |

### Example 15: Cell Lysis by Peptidomimetic Macrocycles

[0689] SJSA-1 cells were plated out one day in advance in clear, flat-bottom plates at a density of 7500 cells/well with 100 μL/well of growth media. Row H columns 10-12 were left empty to be treated with media alone. On the day of the assay, the media was exchanged with RPMI 1% FBS media to result in 90 μL of media per well. 10 mM stock solutions of the peptidomimetic macrocycles were prepared in 100% DMSO. The peptidomimetic macrocycles were diluted serially in 100% DMSO, and further diluted 20-fold in sterile water to prepare working stock solutions in 5% DMSO/water. The concentrations of the peptidomimetic macrocycles ranged from 500 μM to 62.5 μM.

[0690] 10 μL of each compound solution was added to the 90 μL of SJSA-1 cells to yield final concentration of 50 μM to 6.25 μM in 0.5% DMSO-containing media. The negative control (non-lytic sample) was 0.5% of DMSO alone. The positive control (lytic) samples included 10 μM of Melittin and 1% Triton X-100. The cell plates were incubated for 1 h at 37° C. After incubation for 1 h, the morphology of the cells was examined by microscope. The plates were then centrifuged at 1200 rpm for 5 min at room temperature. 40 μL of the supernatant for each peptidomimetic macrocycle and control sample was transferred to clear assay plates. LDH release was measured using an LDH cytotoxicity assay kit. The results of the cell lysis assay are shown in TABLE 8:

TABLE 8

| | 6.25 μM | 12.5 μM | 25 μM | 50 μM |
|---|---|---|---|---|
| | % Lysed | % Lysed | % Lysed | % Lysed |
| SP# | cells (1 h LDH) | cells (1 h LDH) | cells (1 h LDH) | cells (1 h LDH) |
| 3 | 1 | 0 | 1 | 3 |
| 4 | −2 | 1 | 1 | 2 |
| 6 | 1 | 1 | 1 | 1 |
| 7 | 0 | 0 | 0 | 0 |
| 8 | −1 | 0 | 1 | 1 |
| 9 | −3 | 0 | 0 | 2 |
| 11 | −2 | 1 | 2 | 3 |
| 15 | 1 | 2 | 2 | 5 |
| 18 | 0 | 1 | 2 | 4 |
| 19 | 2 | 2 | 3 | 21 |
| 22 | 0 | −1 | 0 | 0 |
| 26 | 2 | 5 | −1 | 0 |
| 32 | 0 | 0 | 2 | 0 |
| 39 | 0 | −1 | 0 | 3 |
| 43 | 0 | 0 | −1 | −1 |
| 55 | 1 | 5 | 9 | 13 |
| 65 | 0 | 0 | 0 | 2 |
| 69 | 1 | 0.5 | −0.5 | 5 |
| 71 | 0 | 0 | 0 | 0 |
| 72 | 2 | 1 | 0 | 3 |
| 75 | −1 | 3 | 1 | 1 |
| 77 | −2 | −2 | 1 | −1 |
| 80 | 0 | 1 | 1 | 5 |
| 81 | 1 | 1 | 0 | 0 |
| 82 | 0 | 0 | 0 | 1 |
| 99 | 1.5 | 3 | 2 | 3.5 |
| 108 | 0 | 0 | 0 | 1 |
| 114 | 3 | −1 | 4 | 9 |
| 115 | 0 | 1 | −1 | 6 |
| 118 | 4 | 2 | 2 | 4 |
| 120 | 0 | −1 | 0 | 6 |
| 121 | 1 | 0 | 1 | 7 |
| 122 | 1 | 3 | 0 | 6 |
| 123 | −2 | 2 | 5 | 3 |
| 125 | 0 | 1 | 0 | 2 |
| 126 | 1 | 2 | 1 | 1 |
| 130 | 1 | 3 | 0 | −1 |
| 139 | −2 | −3 | −1 | −1 |
| 142 | 1 | 0 | 1 | 3 |
| 144 | 1 | 2 | −1 | 2 |
| 147 | 8 | 9 | 16 | 55 |
| 148 | 0 | 1 | −1 | 0 |
| 149 | 6 | 7 | 7 | 21 |
| 150 | −1 | −2 | 0 | 2 |
| 153 | 4 | 3 | 2 | 3 |
| 154 | −1 | −1.5 | −1 | −1 |
| 158 | 0 | −6 | −2 | |
| 160 | −1 | 0 | −1 | 1 |
| 161 | 1 | 1 | −1 | 0 |
| 169 | 2 | 3 | 3 | 7 |
| 170 | 2 | 2 | 1 | −1 |
| 174 | 5 | 3 | 2 | 5 |
| 175 | 3 | 2 | 1 | 0 |
| 177 | −1 | −1 | 0 | 1 |
| 182 | 0 | 2 | 3 | 6 |
| 183 | 2 | 1 | 0 | 3 |
| 190 | −1 | −1 | 0 | 1 |
| 196 | 0 | −2 | 0 | 3 |
| 197 | 1 | −4 | −1 | −2 |
| 203 | 0 | −1 | 2 | 2 |
| 204 | 4 | 3 | 2 | 0 |
| 211 | 5 | 4 | 3 | 1 |
| 217 | 2 | 1 | 1 | 2 |
| 218 | 0 | −3 | −4 | 1 |
| 219 | 0 | 0 | −1 | 2 |
| 221 | 3 | 3 | 3 | 11 |
| 223 | −2 | −2 | −4 | −1 |
| 230 | 0.5 | −0.5 | 0 | 3 |
| 232 | 6 | 6 | 5 | 5 |
| 233 | 2.5 | 4.5 | 3.5 | 6 |
| 237 | 0 | 3 | 7 | 55 |
| 243 | 4 | 23 | 39 | 64 |
| 244 | 0 | 1 | 0 | 4 |
| 245 | 1 | 14 | 11 | 56 |
| 247 | 0 | 0 | 0 | 4 |
| 249 | 0 | 0 | 0 | 0 |
| 254 | 11 | 34 | 60 | 75 |
| 279 | 6 | 4 | 5 | 6 |
| 280 | 5 | 4 | 6 | 18 |
| 284 | 5 | 4 | 5 | 6 |
| 286 | 0 | 0 | 0 | 0 |
| 287 | 0 | 6 | 11 | 56 |
| 316 | 0 | 1 | 0 | 1 |
| 317 | 0 | 1 | 0 | 0 |
| 331 | 0 | 0 | 0 | 0 |
| 335 | 0 | 0 | 0 | 1 |
| 336 | 0 | 0 | 0 | 0 |
| 338 | 0 | 0 | 0 | 1 |
| 340 | 0 | 2 | 0 | 0 |
| 341 | 0 | 0 | 0 | 0 |
| 343 | 0 | 1 | 0 | 0 |
| 347 | 0 | 0 | 0 | 0 |
| 349 | 0 | 0 | 0 | 0 |
| 351 | 0 | 0 | 0 | 0 |
| 353 | 0 | 0 | 0 | 0 |
| 355 | 0 | 0 | 0 | 0 |
| 357 | 0 | 0 | 0 | 0 |
| 359 | 0 | 0 | 0 | 0 |
| 413 | 5 | 3 | 3 | 3 |
| 414 | 3 | 3 | 2 | 2 |
| 415 | 4 | 4 | 2 | 2 |

### Example 16: p53 GRIP Assay

[0691] The p53 GRIP assay monitors the protein interaction of p53 and MDM2, and the cellular translocation of GFP-tagged p53 in response to drug compounds or other stimuli. Recombinant CHO-hIR cells stably express human p53 (1-312) fused to the C-terminus of enhanced green fluorescent protein (EGFP) and PDE4A4-MDM2 (1-124), a fusion protein between PDE4A4 and MDM2 (1-124). The effects of experimental conditions on the interaction of p53 and MDM2 can be measured.

[0692] CHO-hIR cells were regularly maintained in Ham's F12 media supplemented with penicillin-streptomycin, 0.5 mg/ml Geneticin, 1 mg/ml Zeocin, and 10% FBS. Cells were seeded into 96-well plates at a density of 7000 cells/100 μL/well using culture media 18-24 h prior to running the assay. On the day of the assay, the media was refreshed, and PD-177 was added to cells to reach a final concentration of 3 μM to activate foci formation. Control wells were kept without PD-177. 24 h post-stimulation with PD-177, the cells were washed once with reduced-serum media. 50 μL of the reduced-serum media supplemented with PD-177 (6 μM) was added to the cells. The peptides were diluted from 10 mM DMSO stock solutions to 500 μM working stock solutions in sterile water. Further dilutions were made in 0.5% DMSO to keep the concentration of DMSO constant across the samples. The final highest DMSO concentration was 0.5%, and 0.5% DMSO was used as the negative control. (−)-Nutlin-3 (10 mM) was used as a positive control. Nutlin was diluted using the same dilution scheme used for the peptides.

[0693] 50 μL of the 2× desired concentration peptide solutions were added to the appropriate wells to achieve desired final concentrations. Cells were then incubated with the peptides for 6 h at 37° C. in a humidified 5% CO₂ atmosphere. After incubation, the cells were fixed by gently aspirating out the media and adding 150 μL of fixing solution per well for 20 minutes at room temperature. The fixed cells were washed 4 times with 200 μL PBS per well each time. At the end of last wash, 100 L of 1 M Hoechst staining solution was added. The sealed plates were incubated for at least 30 min in the dark, and washed with PBS to remove excess staining solution. PBS was added to each well. The plates could be stored at 4° C. in the dark for up to 3 days. The translocation of p53/MDM2 was imaged using a molecular translocation module using 10× objective and XF-100 filter sets for Hoechst and GFP. The minimal acceptable number of cells per well used for image analysis was set to 500 cells.

### Example 17: MCF-7 Breast Cancer Study Using SP315, SP249 and SP154

[0694] A xenograft study was performed to test the efficacy of SP315, SP249 and SP154 in inhibiting tumor growth in athymic mice in the MCF-7 breast cancer xenograft model. A negative control stapled peptide (SP252) and a point mutation of SP154 (F to A at position 19) were tested in one group. The negative control stapled peptide exhibited no activity in the SJSA-1 in vitro viability assay. Slow release 90 day 0.72 mg 17β-estradiol pellets were implanted subcutaneously (sc) on the nape of the neck one day prior to tumor cell implantation (Day −1). On Day 0, MCF-7 tumor cells were implanted sc in the flank of female nude (Cr1:NU-Foxn1nu) mice. On Day 18, the resultant sc tumors were measured using calipers to determine their length and width, and the mice were weighed. The tumor sizes were calculated using the formula (length×width²)/2, and expressed as cubic millimeters (mm³). Mice with tumors smaller than 85.3 mm³ or larger than 417.4 mm³ were excluded from the subsequent group formation. Thirteen groups of mice, 10 mice per group, were formed by randomization such that the group mean tumor sizes were essentially equivalent (mean of groups±standard deviation of groups=180.7±17.5 mm³).

[0695] SP315, SP249, SP154 and SP252 dosing solutions were prepared from peptides formulated in a vehicle containing MPEG(2K)-DSPE at 50 mg/mL concentration in a 10 mM histidine-buffered saline solution at pH 7. The peptide formulations were prepared once for the duration of the study. The vehicle was used as the vehicle control in the subsequent study.

[0696] Each group was assigned to a different treatment regimen. Group 1, as the vehicle negative control group, received the vehicle administered at 8 mL/kg body weight intravenously (I.V.) three times per week from Days 18-39. Group 2 received SP154 as an I.V. injection at 30 mg/kg three times per week. Group 3 received SP154 as an I.V. injection at 40 mg/kg twice a week. Group 4 received 6.7 mg/kg SP249 as an I.V. injection three times per week. Group 5 received SP315 as an I.V. injection of 26.7 mg/kg three times per week. Group 6 received SP315 as an I.V. injection of 20 mg/kg twice per week. Group 7 received SP315 as an I.V. injection of 30 mg/kg twice per week. Group 8 received SP315 as an I.V. injection of 40 mg/kg twice per week. Group 9 received 30 mg/kg SP252 as an I.V. injection three times per week.

During the dosing period, the mice were weighed and the tumors were measured 1-2 times per week. Tumor growth inhibition was compared with the vehicle group. Changes in body weight and number of mice with ≥20% body weight loss or death is shown in TABLE 9. Tumor growth inhibition (TGI) was calculated as

% TGI=100−[(TuVol^{Treated-day x}−TuVol^{Treated-day 18})/(TuVol^{Vehicle negative control-day x}−TuVol^{vehicle negative control-day 18})*100,

where x=day that effect of treatment is being assessed. Group 1, the vehicle negative control group, showed good tumor growth rates.

[0697] 2 mice died during treatment with SP154 when dosed with 40 mg/kg twice a week. The dosing regimen of 30 mg/kg of SP154 three times per week yielded a TGI of 84%. 4 mice died in the group dosed with SP249 6.7 mg/kg three times. No body weight loss or deaths were noted for all groups treated with SP315. Dosing with 40 mg/kg of SP315 twice per week produced the highest TGI (92%). The dosing regimens of SP315 of 26.7 mg/kg three times per week, 20 mg/kg twice per week, 30 mg/kg twice per week produced TGI of 86, 82, and 85%, respectively. No body weight loss or deaths were noted for the group treated with SP252 30 mg/kg three times per week. The TGI was 88% on day 32, and reduced to 41% by day 39.

TABLE 9

| Group | | % BW | No. with ≥10% | No. with ≥20% | |
|---|---|---|---|---|---|
| Number | Treatment Group | Change | BW Loss | BW Loss or death | % TGI |
| 1 | Vehicle | +8.6 | 0/10 | 0/10 | — |
| 2 | SP154 30 mg/kg | +5.7 | 0/10 | 0/10 | *84 |
| | 3x/wk I.V. | | | | |
| 3 | SP154 40 mg/kg | N/A | 0/10 | 2/10 (2 deaths) | Regimen not |
| | 2x/wk I.V. | | | | tolerated |
| 4 | SP249 6.7 mg/kg | N/A | 6/10 | 4/10 | Regimen not |
| | 3x/wk I.V. | | | | tolerated |
| 5 | SP315 26.7 mg/kg | +3.7 | 0/10 | 0/10 | *86 |
| | 3x/wk I.V. | | | | |
| 6 | SP315 20 mg/kg | +3.9 | 0/10 | 0/10 | *82 |
| | 2x/wk I.V. | | | | |
| 7 | SP315 30 mg/kg | +8.0 | 0/10 | 0/10 | *85 |
| | 2x/wk I.V. | | | | |
| 8 | SP315 40 mg/kg | +2.1 | 0/10 | 0/10 | *92 |
| | 2x/wk I.V. | | | | |
| 9 | SP252 30 mg/kg | +3.3 | 0/10 | 0/10 | *41 |
| | 3x/wk I.V. | | | | |

*p ≤ 0.05 Vs Vehicle Control

### Example 18: Testing of Peptidomimetic Macrocycles for Ability to Reduce Immune Checkpoint Protein Expression or Inhibit Immune Checkpoint Protein Activity

[0698] Assays were performed to determine whether the peptidomimetic macrocycles can diminish PD-L1 activity or expression. HCT-116 p53^{+/+} cells and HCT-116 p53^{-/-} cells were treated with DMSO or 10 μM SP or 20 μM SP. FIG. 1 shows that treatment with SP262 and SP154 resulted in decreased PD-L1 expression in HCT-116 p53^{+/+} cells, but not HCT-116 p53^{-/-} cells. Similar assays are performed in cell lines that express higher levels of PD-L1, such as A549 cells, H460 cells, and syngeneic mouse cell lines.

[0699] Assays are performed to determine whether the peptidomimetic macrocycles can diminish PD-L1 activity or expression via miR-34a to enhance immune response against tumors. Assays are performed to determine whether the peptidomimetic macrocycles of the invention mimic the immune-enhancing effects of anti-PD-1 and/or anti-PD-L1 agents, with the added benefit of inducing cell cycle arrest and apoptosis.

[0700] Cancer cells from different lineages MCF-7 (breast), HCT-116 (large intestine), MV4-11 (leukemia), DOHH2, and A375 (melanoma) are dosed with peptidomimetic macrocycles. These cell lines and others are selected to include cell lines that have high levels of PD-L1 expression and others that have low levels of PD-L1 expression. Changes in protein and mRNA levels of PD-1, PD-L1 and miR-34a are measured, for example, using flow cytometry. p53 and p21 are used as controls. RT-PCR assays are performed to quantify miR-34a, miR-34b, and/or miR-34c levels in samples in parallel with flow cytometry measurements. Full dose-response curves are taken 24, 48, and 72 hours after dosing. Additionally, apoptosis measurements are made in parallel.

### Example 19: Phase I Dose-Escalation Clinical Trial for AP1

[0701] A dose-escalation study was conducted in a Phase 1 open-label, multi-center, two-arm trial of the compound AP1. AP1 was administered by I.V. infusion to patients with advanced solid tumors or lymphomas expressing WT p53 that was refractory to or intolerant of standard therapy or for which no standard therapy existed. The trial established a 3.1 mg/kg dose of AP1 as the MTD (i.e., the highest dose of the drug that did not cause unacceptable side effects) when dosed once a week by I.V. administration. The trial also evaluated the safety, tolerability, and the pharmacokinetics of AP1 and provided a preliminary assessment of activity using pharmacodynamic biomarkers and imaging assessments.

[0702] 71 patients were enrolled in the dose-escalation trial. The trial used a “3+3” dose-escalation design. Patients in the first two dose levels received AP1 once a week for three consecutive weeks over a 28-day cycle or a lower dose level twice a week for two consecutive weeks over a 21-day cycle. The dose-escalation study was used to evaluate different benefit-risk ratios and provide supporting evidence for dose selection during the clinical development of AP1.

[0703] Starting with dose level 4, patients who had cancers associated with HPV were excluded from enrollment because HPV is known to destroy WT p53. Dosing started at relatively low dose levels, and the protocol did not require patients in the first three dose levels to have WT p53 or cancers unassociated with HPV because the trial focused primarily on the safety and tolerability of AP1.

[0704] To identify specific WT p53 patients for the clinical trials, commercially available third-party assays and a central laboratory were used to conduct next generation sequencing on archived tumor tissue samples or fresh biopsy samples from patients taken prior to enrollment.

[0705] WT p53 status was not required of the patients for the initial three dose levels prior to enrollment. The patients' WT p53 statuses were established through testing after enrollment. Seven of the 13 patients enrolled in those dose levels who completed at least one cycle were confirmed to have WT p53 status, the status of four was unknown, and two patients tested positive for mutated p53. Starting with dose level 4, WT p53 status was a mandatory eligibility criterion.

[0706] Clinical activity or a patient's response to AP1 was determined using pharmacodynamics (PD) biomarkers and imaging assessments. PD biomarkers provided information on on-target activity, specific patient type responses, and provided an early insight on AP1's effect on tumors. The effect of AP1 on potential PD biomarkers was determined for different sources of biological samples, such as tumor biopsies, circulating tumor cells where detectable, mononuclear blood cells, and blood and bone marrow samples. Depending on the sample type, the PD biomarkers included measures of MDMX, MDM2, p21, p53, apoptosis, macrophage inhibitory cytokine 1, or MIC-1. Standard imaging assessments, such as computed tomography (CT) or positron emission tomography (PET), were used to obtain images from patients.

[0707] Anti-tumor activity was measured using Response Evaluation Criteria in Solid Tumors (RECIST) criteria for patients with solid tumors, and 2015 International Working Group (IWG) criteria for patients with lymphomas. The RECIST and IWG criteria enabled the objective evaluation of whether a tumor had progressed, stabilized, or decreased in size. Anti-tumor effects were also determined through physical examinations or clinically validated blood or serum tumor markers.

[0708] FIG. 2 illustrates the dosing regiments (DRs) used in the “3+3” dose escalation trial. DR-A depicts patients that received AP1 once a week for three consecutive weeks over a 28-day cycle. DR-B depicts patients who received lower doses of AP1 twice a week for two consecutive weeks over a 21-day cycle. The MTD of AP1 was 3.1 mg/kg, and the multiple-ascending dose (MAD) ended at 4.4 mg/kg.

### Example 20: Pharmacokinetic Profile of AP1

[0709] AP1 was delivered systematically using I.V. administration because of the potential advantage of avoiding metabolic impact from hepatic and gastrointestinal enzymes as well as reproducible systemic bioavailability.

[0710] FIG. 3 shows drug concentration levels in patient plasma at all dose levels tested in Arm A (left panel) and Arm B (right panel). AP1 consistently produced a dose-related increase in maximum drug serum concentrations observed (Cₘₐₓ) in patients, and longer corresponding half-lives of between five and seven hours at higher dose levels. Data were collected at different time points after the start of infusion (SOI) and the end of infusion (EOI).

### Example 21: Safety Results for AP1

[0711] AP1 has been considered by the dose escalation trial's investigators to be generally well tolerated. The most frequently reported drug-related events to date reported by ≥10% of the patients were nausea, fatigue, vomiting, decreased appetite, anemia, headache, and constipation. Transient decreases in lymphocytes post-dosing and primarily Grade 1 and 2 abnormalities were observed in approximately 50% of patients with full recovery within a few days.

[0712] Seven patients experienced infusion-related reactions, and administration of AP1 was discontinued for three patients. Eight patients experienced dose reductions, including two patients who had been on study treatment for over 1 year, and another patient who had been on study treatment for 11 months. One dose limiting toxicity (DLT) of Grade 3 fatigue was reported at 3.1 mg/kg once weekly dosing, and four DLTs (Grade 3 elevated alkaline phosphatase, Grade 3 hypotension, Grade 3 anemia, Grade 4 neutropenia) were reported at 4.4 mg/kg once weekly. Nine severe adverse events (SAEs) were reported, two of which were related to AP1. Both events were Grade 3 hypotension and were at the 3.1 mg/kg and the 4.4 mg/kg once-weekly dosing levels. Grade 3/4 events that were at least possibly related to AP1 occurred in fifteen patients, and included anemia (n=2), an increase in blood alkaline phosphatase levels, diarrhea, fatigue (n=3), hyponatremia, hypotension (n=2), hypoxia, nausea, neutropenia (n=3), and vomiting. Five patients discontinued treatment with AP1 due to these events.

### Example 22: Biomarker Assessments for the Biological Activity of AP1

[0713] Several exploratory biomarkers were used to confirm the pharmacological or on-target biological activity of AP1, aid patient recruitment, and help inform dose selection. In the Phase 1 dose-escalation study, plasma MIC-1 levels were measured at several time points after initial infusion.

[0714] FIG. 4 shows fold-increase levels from baseline levels of plasma MIC-1 on cycle one, day one, two, or three (C1D1, C1D2, C1D3) at dose levels at or above 0.83 mg/kg. The results demonstrated that dose-related, on-mechanism increased in MIC-1 blood levels after the end of AP1 infusion (EOI) achieved a maximal 24 hr MIC-1 increase above baseline at doses ≥2.1 mg/kg. Prolonged p53 activation of MIC-1 was observed 48 hours after the start of infusion (SOI).

### Example 23: Clinical Activity of AP1

[0715] Clinical activity or responses to AP1 were assessed using imaging methods. Anti-tumor activity was measured using RECIST criteria for patients with solid tumors and the IWG criteria for patients with lymphomas to objectively evaluate whether a tumor progressed, stabilized, or shrunk. In the dose-escalation Phase 1 trial patients in Arm A (28-day cycle group) of the pharmacokinetic study (EXAMPLE 20), plasma AP1 levels were measured at baseline and again after two cycles of study medication, or approximately within 56 days following initial dosing and every 2 cycles thereafter. Patients in Arm B (21-day cycle group of the pharmacokinetic study (EXAMPLE 20), plasmas AP1 levels were measured at baseline and again after three cycles of study medication, or approximately within 63 days following initial dosing and every three cycles thereafter.

[0716] FIG. 5 shows a waterfall plot that illustrates the anti-tumor activity of AP1 in patients of the Phase 1 dose-escalation trial. The percent change in tumor volume for each evaluable patient (i.e., having measurable disease by CT or PET-CT scan) is plotted from the highest to lowest value, or low to high response, and each bar of the histogram is colored by the best overall response measured for that patient per RECIST or IWG criteria.

[0717] 57 patients were evaluated using RECIST or IWG guidelines, including the 52 with CT- or PET-CT scans shown in FIG. 5, and five with clinical or objective evidence of disease progression without scans. Of the evaluable patients, 25 (44%) patients demonstrated disease control in at least one scan following the start of AP1 therapy. There were two responses (CRs), two partial responses (PRs), and 21 responses with stabilization of tumor size (SDs). The latter included 7 stable diseased patients that exhibited tumor shrinkage.

[0718] The anti-tumor activity of the Phase 1 dose-escalation trial compared favorably to results of Phase 1 trials using valuable oncology agents, such as nivolumab and pembrolizumab. The results for AP1 in 57 patients included 2 R₅, 2 PRs, and 21 (7 shrinkages). For 39 patients treated with nivolumab, the results were 1 R, 2 PRs, and 12 SDs (2 shrinkages). For 30 patients treated with pembrolizumab, the results were 2 R₅, 3 PRs, and 11 SDs (3 shrinkages).

[0719] AP1 yielded a disease control rate of 20/35 (56%) when considering the anti-tumor activity of the Phase 1 dose-escalation trial at doses most relevant to continued clinical development (≥3.2 mg/kg/cycle) and limiting analyses to patients with WT p53. FIG. 6 shows results of the anti-tumor activity study for 33 patients. The study also included results for three additional patients with clinical or objective evidence of disease progression without imaging scans.

[0720] The duration of time a patient continued treatment with AP1 served as an additional measure of anti-tumor activity and continued response to AP1 therapy. FIG. 7 shows the time-on-drug for evaluable p53-WT patients who had CRs, PRs, and SDs when dosed with AP1 at ≥3.2 mg/kg/cycle. The median time a patient received AP1 was 147 days, with an average of 192 days, and a max for one patient of 613 days. Three patients received AP1 for over a year, and all patients who achieved R₅ or PRs since inception of the trial remained on AP1 therapy.

[0721] FIG. 8 PANEL A-FIG. 8 PANEL D shows patient scans from two CR patients observed in the dose-escalation Phase 1 trial. FIG. 8 PANEL A shows a 50-year-old patient with peripheral T-Cell Lymphoma (PTCL), a highly aggressive form of non-Hodgkin's lymphoma. The images showed a strong signal for aberrant cellular metabolism, which indicated cancer in a lymph node of the patient's chest. After six cycles of AP1 treatment, the lymph node returned to its normal size and no was longer detected by the PET tracer as being cancerous (FIG. 8 PANEL B).

[0722] FIG. 8 PANEL C shows images of a 73-year-old patient with Merkel Cell Carcinoma (MCC), a highly aggressive skin cancer. The patient exhibited skin lesions consistent with MCC. After one cycle of AP1 therapy, the skin lesions diminished in size and left only mild scar tissue (FIG. 8 PANEL D). After further treatment with AP1, a biopsy sample from the formerly tumorous skin areas and PET-CT scans showed no trace of cancer in the patient.

### Example 24: Phase 2a Clinical Trials with AP1 in Patients with Peripheral T-Cell Lymphoma

[0723] Based on the results of the dose-escalation study and the complete response observed in a patient with PTCL, a Phase 2a clinical trial was conducted in patients with PTCL. The first patient enrolled in the Phase 2 study in PTCL achieved a partial response. FIG. 9 LEFT PANEL shows PET scans from the first patient enrolled in the Phase 2 study prior to treatment with AP1. FIG. 9 RIGHT PANEL shows PET scans from the first patient enrolled in the Phase 2 study after 2 cycles of treatment with AP1. Before beginning treatment with AP1, a 39-year-old male patient exhibited strong signals for aberrant cellular metabolism indicative of cancer in the lymph nodes of his neck, under his arms, in his chest, and in his groin (FIG. 9 LEFT PANEL). Following two cycles of treatment with AP1, the lymph nodes picked up a substantially reduced amount of the PET tracer that would indicate the lymph nodes were cancerous (FIG. 9 RIGHT PANEL).

[0724] TABLE 10 shows Phase 2a study results of seven PTCL patients on AP1 therapy, with details on the status, days on AP1 treatment and best overall response of each patient.

TABLE 10

| Patient | | | Days on | Best overall |
|---|---|---|---|---|
| # | Study | Status | treatment | response |
| 1 | Dose escalation | Ongoing | 487 | CR |
| 2 | Phase 2a | Disease progression | 122 | PR |
| 3 | Phase 2a | Ongoing | 134 | SD |
| 4 | Phase 2a | Disease progression | 66 | ODP |
| 5 | Phase 2a | Ongoing | 53 | Tbd |
| 6 | Phase 2a | Ongoing | 32 | Tbd |
| 7 | Phase 2a | Ongoing | 1 | Tbd |

### Example 25: Survival in an In Vivo Xenotransplantation Model

[0725] AP1 was tested for overall survival in an in vivo xenotransplantation model. Engraftment of human CD45 leukemic cells after 5 weeks ranged from 1% to 73% in vehicle and 0% to 0.05% in AP1 treated animals. Mice treated with AP1 lived significantly longer than vehicle treated counterparts. The median survival for group 1 and group 2 was 34 days and 83 days, respectively (p<0.0001). Long term survival was assessed at 130 days post start of treatment, with 22% of mice in group 2 and 60% of mice in group 3 still alive.

[0726] Treatment with AP1 doubled the overall survival in an in vivo implantation model. FIG. 10 TOP PANEL shows percentage of human CD45 engraftment in bone marrow for the vehicle, and treatment with 20 mg/kg AP1. FIG. 10 BOTTOM PANEL shows the percentage survival of mice upon treatment with the vehicle or administration of AP1.

### Example 26: WST-1 Cell Proliferation Assays

[0727] The WST-1 variant of the MTT assay was used to measure cell viability. WST-1 is a cell-impermeable, sulfonated tetrazolium salt that can be used to examine cell viability without killing the cells. The human tumor cell lines MCF-7 and MOLT-3 were grown in EMEM and RPMI1640, respectively. All media were supplemented with 10% (v/v) fetal calf serum, 100 units of penicillin, and 100 μg/mL of streptomycin at 37° C. and 5% CO₂. Prior to dosing, MCF-7 cells were switched to serum-free medium and grown at 37° C. overnight. One day prior to assaying, the cells were trypsinized, counted, and seeded at pre-determined densities in 96-well plates as follows: MCF-7, 5000 cells/well/200 μL; MOLT-3, 30,000 cells/well/200 μL.

[0728] FIG. 11 shows a graph of MCF-7 cell proliferation determined using a WST-1 assay measured at the indicated time points after different numbers of MCF-7 cells were grown at 37° C. for a 24 hour growth period. The MCF-7 cells were not treated with any peptides or compounds.

### Example 27: Combination Therapy with AP1 and CDK4/CDK6 Inhibitors

[0729] a. Combination Therapy with AP1 and Ribociclib

[0730] MCF-7 cell proliferation was measured using the WST-1 assay described in EXAMPLE 26. MCF-7 cells were treated with ribociclib at concentrations of 0 μM, 0.0003 μM, 0.001 μM, 0.003 μM, 0.01 μM, 0.03 μM, 0.1 μM, 0.3 μM, 1 μM, 3 μM, 10 μM, and 30 μM. FIG. 12 shows MCF-7 cell proliferation when the cells were treated with varying concentrations of ribociclib. MCF-7 cells were treated with AP1 or a combination of AP1 and ribociclib at concentrations of 0.1 μM, 0.3 μM, 1 μM, and 3 μM. The concentration of AP1 was kept constant. FIG. 13 shows MCF-7 cell proliferation when the cells were treated with AP1 or AP1 with varying concentrations of ribociclib.

[0731] MCF-7 cells were treated with AP1 at concentrations of 0 μM, 0.0003 μM, 0.001 μM, 0.003 μM, 0.01 μM, 0.03 μM, 0.1 μM, 0.3 μM, 1 μM, 3 μM, 10 μM, and 30 μM. FIG. 14 shows MCF-7 cell proliferation when the cells were treated with varying concentrations of AP1. MCF-7 cells were treated with ribociclib or a combination of ribociclib and AP1 at concentrations of 0.1 μM, 0.3 μM, and 1 μM. The concentration of ribociclib was kept constant. FIG. 15 shows MCF-7 cell proliferation when the cells were treated with ribociclib or ribociclib with varying concentrations of AP1. FIG. 16 shows a combination index plot of ribociclib in MCF-7 cells.

b. Combination Therapy with AP1 and Abemaciclib

[0732] MCF-7 cell proliferation was measured using the WST-1 assay described in EXAMPLE 26. MCF-7 cells were treated with abemaciclib at concentrations of 0 μM, 0.0003 μM, 0.001 μM, 0.003 μM, 0.01 μM, 0.03 μM, 0.1 μM, 0.3 μM, 1 μM, 3 μM, 10 μM, and 30 μM. FIG. 17 shows MCF-7 cell proliferation when the cells were treated with varying concentrations of abemaciclib. MCF-7 cells were treated with AP1 or a combination of AP1 and abemaciclib at concentrations of 0.1 μM, 0.3 μM, 1 μM, and 3 μM. The concentration of AP1 was kept constant. FIG. 18 shows MCF-7 cell proliferation when the cells were treated with AP1 or AP1 with varying concentrations of abemaciclib.

[0733] MCF-7 cells were treated with AP1 at concentrations of 0 μM, 0.0003 μM, 0.001 μM, 0.003 μM, 0.01 μM, 0.03 μM, 0.1 μM, 0.3 μM, 1 μM, 3 μM, 10 μM, and 30 μM. FIG. 19 shows MCF-7 cell proliferation when the cells were treated with varying concentrations of AP1. MCF-7 cells were treated with abemaciclib or a combination of abemaciclib and AP1 at concentrations of 0.1 μM, 0.3 μM, and 1 μM. The concentration of abemaciclib was kept constant. FIG. 20 shows MCF-7 cell proliferation when the cells were treated with abemaciclib or abemaciclib with varying concentrations of AP1.

c. Combination Therapy with AP1 and Palbociclib

[0734] The combination of AP1 and palbociclib was tested at various drug doses on MCF-7 cells. Various MCF-7 cell numbers were plated and evaluated 3-7 days after plating to determine the optimal number of cells to be plated and to determine the treatment duration. The optimal number of cells were plated and treated with various concentrations of AP1 alone or with palbociclib alone. MCF-7 cells were evaluated for viability using the WST-1 assay or the CyQUANT method 3-7 days or 120 h after beginning treatment. FIG. 21 shows cell proliferation of MCF-7 cells when the cells were treated with palbociclib alone. FIG. 22 shows cell proliferation of MCF-7 cells when the cells were treated with AP1 alone. A number of concentrations around the IC₅₀ of AP1, and a number of concentrations around the IC₅₀ of palbociclib were determined. The EC₅₀ of AP1 on MCF-7 cells was determined to be 410 nM. The concentrations used to obtain the EC₅₀ value were tested on MCF-7 cells to test the effect of treatment with the combination of AP1 and palbociclib.

[0735] The optimal number of MCF-7 cells were plated and treated with AP1 and palbociclib. The MCF-7 cells were incubated for 3-5 days or 3-7 days. AP1 was added to the cells simultaneously with palbociclib, before adding palbociclib, or after the addition of palbociclib. The cells were evaluated for viability using the CyQUANT method after beginning the simultaneous treatments. FIG. 23 shows MCF-7 cell proliferation when the cells were treated simultaneously with a fixed amount of AP1 and varying amounts of palbociclib. FIG. 24 shows MCF-7 cell proliferation when the cells were treated simultaneously with a fixed amount of palbociclib and varying amounts of AP1.

[0736] The cells were evaluated for viability using a WST-1 assay or MTT assay 3-7 days after beginning the treatments. The effects of adding AP1 and palbociclib in different orders was evaluated using various concentrations of AP1 using the CyQUANT method. FIG. 25 shows MCF-7 cell proliferation when the cells were treated with varying concentrations of AP1 and palbociclib in different orders over a period of 72 h. FIG. 26 shows MCF-7 cell proliferation when the cells were pre-treated with AP1 for 24 h and subsequently treated with varying concentrations of palbociclib; and when the cells were pre-treated with varying concentrations of palbociclib for 24 h and subsequently treated with a fixed amount of AP1. AP1 suppressed MCF-7 cell growth with or without treatment with palbociclib. FIG. 27 shows MCF-7 cell proliferation when the cells were pre-treated with varying concentrations of AP1 for 24 h and subsequently treated with fixed amounts of palbociclib; and when the cells were pre-treated with fixed amounts of palbociclib and subsequently treated with varying concentrations of AP1. Palbociclib suppressed MCF-7 cell growth with or without treatment with AP1.

[0737] The combination of AP1 and palbociclib was tested at various drug doses on MOLT-3 cells. Various MOLT-3 cell numbers were plated and evaluated 3-7 days after plating to determine the optimal number of cells to be plated and to determine the treatment duration. The optimal number of cells were plated and treated with various concentrations of AP1 alone or with palbociclib alone. The MOLT-3 cells were evaluated for viability using the WST-1 assay or the CyQUANT method 3-7 days or 120 h after beginning treatment. FIG. 28 shows MOLT-3 cell proliferation when the cells were treated with palbociclib alone. FIG. 29 shows MOLT-3 cell proliferation when the cells were treated with AP1 alone.

[0738] Combination Index Plots of AP1 and Palbociclib Using WST-1 and CyQUANT Assays in MCF-7 Cells.

[0739] Combination index plots of treatment with AP1 and palbociclib in MCF-7 cells showed additive or increased complementarity. FIG. 30 shows the combination index plot of the treatment of MCF-7 cells with AP1 and palbociclib using a WST-1 assay. FIG. 31 shows the combination index plot of the treatment of MCF-7 cells with AP1 and palbociclib using CyQUANT. Example cooperativity index calculations are shown in TABLE 14. The data are expressed as log(CI). CI values: 0-0.1, very strong synergism; 0.1-0.3, strong synergism; 0.3-0.7, synergism; 0.7-0.85, moderate synergism; 0.85-0.90, slight synergism; 0.90-1.10, nearly additive; 1.10-1.20, slight antagonism; 1.20-1.45, moderate antagonism; 1.45-3.3, antagonism; 3.3-10, strong antagonism; 10, very strong antagonism.

TABLE 14

| Dose AP1 | Dose palbociclib | | |
|---|---|---|---|
| (μM) | (μM) | Effect | CI |
| 0.001 | 0.3 | 0.178 | 0.59570 |
| 0.003 | 0.3 | 0.184 | 0.59898 |
| 0.01 | 0.3 | 0.223 | 0.54530 |
| 0.03 | 0.3 | 0.25 | 0.62998 |
| 0.1 | 0.3 | 0.325 | 0.79278 |
| 0.3 | 0.3 | 0.532 | 0.68885 |
| 1.0 | 0.3 | 0.65 | 1.13080 |
| 3.0 | 0.3 | 0.743 | 1.92593 |
| 10.0 | 0.3 | 0.924 | 1.17267 |
| 30.0 | 0.3 | 0.945 | 2.32597 |
| 0.4 | 0.001 | 0.585 | 0.57898 |
| 0.4 | 0.003 | 0.553 | 0.67550 |
| 0.4 | 0.01 | 0.55 | 0.68802 |
| 0.4 | 0.03 | 0.545 | 0.71276 |
| 0.4 | 0.1 | 0.556 | 0.70459 |
| 0.4 | 0.3 | 0.608 | 0.61579 |
| 0.4 | 1.0 | 0.592 | 0.90805 |
| 0.4 | 3.0 | 0.614 | 1.46501 |
| 0.4 | 10.0 | 0.698 | 2.61449 |
| 0.4 | 30.0 | 0.999 | 0.02893 |

[0740] The efficacy of AP1 alone and in combination with palbociclib was tested in the SJSA-1 osteosarcoma xenograft model using female athymic nude mice. Charles River NCr nu/nu mice with 5×10⁶ SJSA-1 tumor cells in 0% Matrigel® were injected subcutaneously into the flank of the mice. The cell injection volume was 0.1 mL/mouse. The mice were 8-12 weeks of age at the beginning of the study. A pair match was performed when tumors reached an average size of 100 mm³-150 mm³, and the treatment regimen was started. Body weight and caliper measurements were made biweekly to the end of the study.

[0741] Any individual animal with a single observation of >30% body weight loss or three consecutive measurements of >25% body weight loss was euthanized. Any group with a mean body weight loss of >20% or >10% mortality was removed from the study. The group was not euthanized, and the mice were allowed to recover. Within a group with >20% weight loss, individuals hitting the individual body weight loss endpoint was euthanized. If the group treatment-related body weight loss was recovered to within 10% of the original weights, dosing was resumed at a lower dose or less frequent dosing schedule. Animals were monitored individually. The end point of the experiment was a tumor volume of 2000 mm³ or 60 days, whichever came first. Responders were followed for a longer period of time. When the endpoint was reached, the animals were euthanized.

[0742] Palbociclib was prepared as a solution in sodium lactate buffer (50 mM, pH 4.0). An aqueous phosphate-buffered saline solution or sodium lactate (50 mM, pH 4.0) solution was used as the vehicle. The dosing volume was 10 mL/kg (0.2 mL/20 g mouse), and the volume was adjusted according to the body weight of the mouse.

[0743] FIG. 32 shows the effects of AP1, palbociclib, or combination treatment with AP1+palbociclib on the median tumor volumes in the SJSA-1 osteosarcoma xenograft model. The data show that mice treated with a combination of AP1 and palbociclib required a longer duration to reach the same median tumor volume as mice treated with vehicle alone, AP1 alone, or palbociclib alone. Mice first treated with AP1 and treated with palbociclib 6 h after administration of AP1 required a longer duration to reach the same median tumor volume as mice first treated with palbociclib and treated with AP1 6 h after administration of palbociclib.

[0744] TABLE 11 shows the results of the CDK inhibitor efficacy test using combination treatment with AP1 and palbociclib in the SJSA-1 osteosarcoma xenograft model.

TABLE 11

| | Median | | | | | |
|---|---|---|---|---|---|---|
| | tumor | | % TGI | | Median time | Median time |
| | volume | | (±SEM) on | Animals | to tumor | to tumor |
| | (mm³) | | d22¹ (end | with disease | volume > 1000 | volume > 2000 |
| Treatment | D1 | D22 | of dosing) | progression² | mm³ (days) | mm³ (days) |
| Vehicle | 117 | 2500 | — | 10/10 | 12 | 16 |
| AP1 20 mg/kg | 117 | 2150 | 17 (6) | 10/10 | 16 | 21 |
| qwkx4 | | | | | | |
| Palbociclib 75 | 126 | 1418 | 51 (9) | 9/10 | 18 | 24 |
| mg/kg qdx22 | | | | | | |
| AP1 + | 126 | 550 | 82 (2) | 10/10 | 27 | 34 |
| Palbociclib | | | | | | |
| (dose 6 h post | | | | | | |
| AP1) | | | | | | |
| Palbociclib + | 126 | 727 | 71 (3) | 10/10 | 25 | 32 |
| AP1 (6 h post | | | | | | |
| palbociclib | | | | | | |

¹Calculated using vehicle median volumes on d0 and d22
²Defined as three consecutive measurements > 150% of d1 volume

[0745] The efficacy of AP1 alone and in combination with palbociclib was tested in the MCF-7.1 human breast carcinoma xenograft model using female athymic nude mice. Female athymic nude mice were provided with drinking water with 10 μg/mL with 17 beta estradiol supplementation 3 days prior to cell implantation and for the duration of the study. Charles River NCI athymic nude mice were treated with 1×10⁷ MCF-7.1 tumor cells in 0% Matrigel® subcutaneously in the flank. The cell injection volume was 0.1 mL/mouse. The mice were between 8-12 weeks of age at the beginning of the study. A pair match was performed when tumors reached an average size of 100 mm³-150 mm³, and the treatment regimen was started. Body weight and caliper measurements were made biweekly to the end of the study.

[0746] Any individual animal with a single observation of >30% body weight loss or three consecutive measurements of >25% body weight loss was euthanized. Any group with a mean body weight loss of >20% or >10% mortality was removed from the study. The group was not euthanized, and the mice were allowed to recover. Within a group with >20% weight loss, individuals hitting the individual body weight loss endpoint was euthanized. If the group treatment-related body weight loss was recovered to within 10% of the original weights, dosing was resumed at a lower dose or less frequent dosing schedule. Animals were monitored individually. The end point of the experiment was a tumor volume of 1000 mm³ or 60 days, whichever came first. Responders were followed for a longer period of time. When the endpoint was reached, the animals were euthanized.

[0747] Palbociclib was prepared as a solution in sodium lactate buffer (50 mM, pH 4.0). An aqueous phosphate-buffered saline solution or sodium lactate (50 mM, pH 4.0) solution was used as the vehicle. The dosing volume was 10 mL/kg (0.2 mL/20 g mouse), and the volume was adjusted according to the body weight of the mouse.

[0748] FIG. 33 shows the effects of AP1, palbociclib, or combination treatment with AP1+palbociclib on the median tumor volumes in the MCF-7.1 human breast carcinoma xenograft model. The data show that mice treated with a combination of AP1 and palbociclib required a longer duration to reach the same median tumor volume as mice treated with vehicle alone, AP1 alone, or palbociclib alone. FIG. 34 shows individual tumor volumes of mice treated with MCF-7.1 human breast carcinoma xenografts treated with the vehicle. FIG. 35 PANEL A shows the individual tumor volumes of mice treated with AP1 20 mg/kg qwk×4. FIG. 35 PANEL B shows the individual tumor volumes of mice treated with palbociclib 75 mg/kg qd×22. FIG. 35 PANEL C shows the individual tumor volumes of mice treated with AP1, and treated with palbociclib 6 h after administration of AP1. FIG. 35 PANEL D shows the individual tumor volumes of mice treated with palbociclib, and treated with AP1 6 h after administration of AP1. The data show that mice treated with a combination of AP1 and palbociclib required a longer duration to reach the same median tumor volume as mice treated with AP1 alone or palbociclib alone.

[0749] TABLE 12 shows the results of the CDK inhibitor efficacy test using the MCF-7.1 human breast carcinoma xenograft model.

TABLE 12

| | Median | | | | | |
|---|---|---|---|---|---|---|
| | tumor | | % TGI | | Median time | Median time |
| | volume | | (±SEM) on | Animals | to tumor | to tumor |
| | (mm³) | | d22¹ (end | with disease | volume > 500 | volume > 1000 |
| Treatment | D1 | D22 | of dosing) | progression² | mm³ (days) | mm³ (days) |
| Vehicle | 108 | 666 | — | 10/10 | 19 | 27 |
| | | | | | | 9/10 animals |
| | | | | | | have reached |
| | | | | | | endpoint |
| AP1 20 mg/kg | 126 | 473 | 30 (9) | 10/10 | 22 | 35 |
| qwkx4 | | | | | | 10/10 animals |
| | | | | | | have reached |
| | | | | | | endpoint |
| Palbociclib 75 | 108 | 196 | 84 (4) | 8/8 | 37 | 48 |
| mg/kg qdx22 | | | | | | 10/10 animals |
| | | | | | | have reached |
| | | | | | | endpoint |
| AP1 + | 126 | 126 | 95 (3) | 10/10 | 42 | 53 |
| Palbociclib | | | | | | 7/10 animals |
| (dose 6 h post | | | | | | have reached |
| AP1) | | | | | | endpoint |
| Palbociclib + | 126 | 196 | 88 (2) | 9/9 | 37 | 49 |
| AP1 (6 h post | | | | | | 6/7 animals |
| palbociclib | | | | | | have reached |
| | | | | | | endpoint |

¹Calculated using vehicle median volumes on d0 and d22
²Defined as three consecutive measurements > 150% of d1 volume

[0750] The efficacy of AP1 alone and in combination with palbociclib was tested in the A549 xenograft model using female athymic nude mice with the methods described above. FIG. 36 shows the effects of AP1, palbociclib, or combination treatment with AP1+palbociclib on the median tumor volumes in the A549 xenograft model. FIG. 37 PANEL A shows the effect of vehicle treatment on median tumor volumes in the A549 xenograft model. FIG. 37 PANEL B shows the effect of vehicle treatment on median tumor volumes in the A549 xenograft model. The arrows indicate spontaneous tumor shrinkage in vehicle controls. The arrows with * indicate poor growth of tumors late in the study.

[0751] TABLE 13 shows the CDK inhibitor efficacy test in the A549 xenograft model.

TABLE 13

| | Median | | | | | |
|---|---|---|---|---|---|---|
| | tumor | | % TGI | | Median time | Median time |
| | volume | | (±SEM) on | Animals | to tumor | to tumor |
| | (mm³) | | d22¹ (end | with disease | volume > 500 | volume > 1000 |
| Treatment | D1 | D22 | of dosing) | progression² | mm³ (days) | mm³ (days) |
| Vehicle | 126 | 500 | — | 9/10 | 18 | ND |
| | | | | | 9/10 animals | 1/10 animals |
| | | | | | have reached | have reached |
| | | | | | endpoint | endpoint |
| AP1 20 mg/kg | 126 | 405 | 42 (7) | 10/10 | 25 | ND |
| qwkx4 | | | | | 8/10 animals | |
| | | | | | have reached | |
| | | | | | endpoint | |
| Palbociclib 75 | 126 | 288 | 62 (7) | 9/10 | 5/10 animals | ND |
| mg/kg qdx22 | | | | | have reached | |
| | | | | | endpoint | |
| AP1 + | 126 | 343 | 48 (7) | 10/10 | 6/10 animals | ND |
| Palbociclib | | | | | have reached | |
| (dose 6 h post | | | | | endpoint | |
| AP1) | | | | | | |
| Palbociclib + | 126 | 256 | 77 (9) | 7/9 | 4/9 animals | ND |
| AP1 (6 h post | | | | | have reached | |
| palbociclib | | | | | endpoint | |

¹Calculated using vehicle median volumes on d0 and d22
²Defined as three consecutive measurements > 150% of d1 volume

### Example 28: Combination Therapy with AP1 and MEK Inhibitors

[0752] a. Combination Therapy with AP1 and Trametinib

[0753] The combination of AP1 and trametinib was tested on human melanoma tumor C32 cells. FIG. 38 shows C32 cell proliferation when the cells were treated with trametinib alone or trametinib in combination with varying concentrations of AP1. FIG. 39 shows the combination index plot of the treatment of C32 cells with AP1 and trametinib. FIG. 40 shows C32 cell proliferation when the cells were treated with AP1 alone or AP1 with varying concentrations of trametinib. FIG. 41 shows C32 cell proliferation when the cells were treated with varying concentrations of AP1 and varying concentrations of trametinib.

[0754] The combination of AP1 and trametinib was tested on MEL-JUSO cells. FIG. 42 shows MEL-JUSO cell proliferation when the cells were treated with AP1 alone or AP1 and varying concentrations of trametinib. FIG. 43 shows MEL-JUSO cell proliferation when the cells were treated with no agent, AP1 alone, trametinib alone, or 0.03 μM AP1 and 1.0 nM trametinib. FIG. 44 shows MEL-JUSO cell proliferation when the cells were treated with trametinib alone or trametinib with varying concentrations of AP1. FIG. 45 shows the combination index plot of the treatment of MEL-JUSO cells with AP1 and trametinib.

[0755] The combination of AP1 and trametinib was tested on A375 human melanoma cells. Various A375 cell numbers were plated and evaluated 3-7 later to determine the optimal number of cells to be treated and to determine the optimal treatment duration. The optimal number of cells were plated and treated with various concentrations of AP1 alone or trametinib alone. The cells were evaluated for viability using a WST-1 assay or MTT assay 3-7 days after treatment. A number of concentrations around the IC₅₀ of AP1 and a number of concentrations around the IC₅₀ of trametinib were determined. The EC₅₀ of AP1 on A375 cells was 70 nM.

[0756] The cell viability of A375 cells were tested against treatment with AP1 at the selected concentrations in combination with trametinib. The optimal number of A375 cells was plated, and the cells were treated with AP1 and trametinib. The cells were evaluated for viability using a WST-1 assay or MTT assay 3-7 days after beginning simultaneous or sequential treatments with AP1 and trametinib. FIG. 46 shows A375 cell proliferation when the cells were treated with AP1 alone or AP1 in combination with varying concentrations of trametinib. FIG. 47 shows A375 cell proliferation when the cells were treated with trametinib alone or trametinib in combination with varying concentrations of AP1. FIG. 48 shows the combination index plot of the treatment of A375 melanoma cells with AP1 and trametinib.

b. Combination Therapy with AP1 and Binimetinib

[0757] The combination of AP1 and binimetinib was tested on human melanoma tumor C32 cells. The C32 cells were grown in EMEM medium supplemented with 10% (v/v) fetal calf serum, 100 units of penicillin, and 100 μg/mL of streptomycin at 37° C. and 5% CO₂. One day prior to performing the assay, the C32 cells were trypsinized, counted, and seeded at 3000 cells/well/200 μL in 96-well plates. The cells were dosed with AP1 alone, binimetinib alone, or AP1 and binimetinib. The cells were incubated for 72 h, and cell viability was measured using a WST-1 variant of the MTT assay. FIG. 49 shows C32 cell proliferation when the cells were treated with varying concentrations of binimetinib and AP1. FIG. 50 shows C32 cell proliferation when the cells were treated with AP1 alone or AP1 in combination with varying concentrations of binimetinib. FIG. 51 shows C32 cell proliferation when the cells were treated with binimetinib alone or binimetinib in combination with varying concentrations of AP1. FIG. 52 shows the combination index plot of the treatment of C32 cells with AP1 and binimetinib. The combination index plot showed additive or increased complimentarily for treatment with AP1 and binimetinib in C32 cells.

[0758] The combination of AP1 and binimetinib was tested on MEL-JUSO cells. MEL-JUSO cells were grown in EMEM medium supplemented with 10% (v/v) fetal calf serum, 100 units of penicillin, and 100 μg/mL of streptomycin at 37° C. and 5% CO₂. One day prior to performing the assay, the MEL-JUSO cells were trypsinized, counted, and seeded at 3000 cells/well/200 μL in 96-well plates. The cells were dosed with AP1 alone, binimetinib alone, or AP1 and binimetinib. The cells were incubated for 72 h, and cell viability was measured using a WST-1 variant of the MTT assay.

[0759] FIG. 53 shows MEL-JUSO cell proliferation when the cells were treated with AP1 alone or AP1 in combination with varying concentrations of binimetinib. FIG. 54 shows MEL-JUSO cell proliferation when the cells were treated with AP1 alone or AP1 in combination with varying concentrations of binimetinib. FIG. 55 shows MEL-JUSO cell proliferation when the cells were treated with binimetinib alone or binimetinib in combination with varying concentrations of AP1. FIG. 56 shows the combination index plot of the treatment of MEL-JUSO cells with AP1 and binimetinib. The combination index plot showed additive or increased complimentarily for treatment with AP1 and binimetinib in MEL-JUSO cells.

c. Combination Therapy with AP1 and Pimasertib

[0760] The combination of AP1 and pimasertib was tested on human melanoma tumor C32 cells. FIG. 57 shows C32 cell proliferation when the cells were treated with AP1 alone or AP1 in combination with varying combinations of pimasertib. FIG. 58 shows C32 cell proliferation when the cells were treated with varying concentrations of AP1 and pimasertib. FIG. 59 shows C32 cell proliferation when the cells were treated with pimasertib alone or pimasertib in combination with varying concentrations of AP1. FIG. 60 shows the combination index plot of the treatment of C32 cells with AP1 and pimasertib.

[0761] The combination of AP1 and pimasertib was tested on MEL-JUSO cells. FIG. 61 shows MEL-JUSO cell proliferation when the cells were treated with AP1 alone or AP1 in combination with varying concentrations of pimasertib. FIG. 62 shows MEL-JUSO cell proliferation when the cells were treated with AP1 and pimasertib. FIG. 63 shows MEL-JUSO cell proliferation when the cells were treated with pimasertib alone or pimasertib in combination with varying concentrations of AP1. FIG. 64 shows the combination index plot of the treatment of MEL-JUSO cells with AP1 and pimasertib.

d. Combination Therapy with AP1 and Selumetinib

[0762] The combination of AP1 and selumetinib was tested on human melanoma tumor C32 cells. FIG. 65 shows C32 cell proliferation when the cells were treated with AP1 alone or AP1 in combination with varying combinations of selumetinib. FIG. 66 shows C32 cell proliferation when the cells were treated with varying concentrations of AP1 and selumetinib. FIG. 67 shows C32 cell proliferation when the cells were treated with selumetinib alone or selumetinib in combination with varying concentrations of AP1. FIG. 68 shows the combination index plot of the treatment of C32 cells with AP1 and selumetinib.

[0763] The combination of AP1 and pimasertib was tested on MEL-JUSO cells. FIG. 69 shows MEL-JUSO cell proliferation when the cells were treated with AP1 alone or AP1 in combination with varying concentrations of pimasertib. FIG. 70 shows MEL-JUSO cell proliferation when the cells were treated with AP1 and pimasertib. FIG. 71 shows MEL-JUSO cell proliferation when the cells were treated with pimasertib alone or pimasertib in combination with varying concentrations of AP1. FIG. 72 shows the combination index plot of the treatment of MEL-JUSO cells with AP1 and pimasertib.

### Example 29: Combination Therapy with AP1 and Cancer Agents

[0764] a. Clinical Development for the Treatment of Acute Myeloid Leukemia

[0765] AP1 was tested for the treatment of patients with the hematological cancers, Acute Myeloid Leukemia (AML) or Myelodysplastic Syndrome (MDS), expressing WT p53. AML and MDS patients received AP1 or AP1 in combination with cytarabine. Cytarabine is an important agent for the treatment of patients with AML or MDS. Combination treatment is a standard treatment practice in oncology used to improve patient outcomes. FIG. 73 shows combination treatment and dosing regimens used to study the effects of AP1 to treat AML.

[0766] TABLE 14 shows initial patient analyses of the AML study. Of the evaluable patients where bone marrow biopsies were available before and after dosing with AP1, 3 patients demonstrated stabilization of their disease.

TABLE 14

| | | | | Days on | Best overall |
|---|---|---|---|---|---|
| Patient # | Disease | Dose level | Status | treatment | response |
| 1 | MDS | 3.1 alone | Disease | 98 | SD |
| | | | progression | | |
| 2 | MDS | 3.1 alone | Ongoing | 138 | SD |
| 3 | AML | 3.1 alone | Withdrew | 99 | SD |
| | | | consent | | |
| 4 | AML | 3.1 combo | Disease | 68 | ODP |
| | | | progression | | |
| 5 | AML | 3.1 combo | Ongoing | 41 | tbd |
| 6 | AML | 3.1 combo | Ongoing | 19 | tbd |
| 7 | MDS | 4.4 alone | Ongoing | 82 | tbd |
| 8 | MDS | 4.4 alone | Ongoing | 47 | tbd |

b. Combination Therapy with AP1, Paclitaxel, and Eribulin

[0767] The efficacy of AP1 alone and in combination with paclitaxel or eribulin was tested in the MCF-7.1 human breast carcinoma xenograft model using female athymic nude mice. TABLE 15 shows the dosing group numbers and amounts of paclitaxel and eribulin for the combination treatment.

TABLE 15

| | | AP1 | | |
|---|---|---|---|---|
| Drug | Amount | 0 mg/kg | 5 mg/kg | 10 mg/kg |
| Paclitaxel | 0 mg/kg | 1 | 3 | 2 |
| | 10 mg/kg | 5 | 10 | 9 |
| | 15 mg/kg | 4 | 8 | 7 |
| Eribulin | 0.1 mg/kg | 6 | 12 | 11 |

[0768] Animals were provided with drinking water with 10 μg/mL of 17 beta-estradiol supplementation, 3 days prior to cell implementation and for the duration of the study. Charles River NCr nu/nu mice were treated with subcutaneous injections of 1×10⁷ MCF-7.1 tumor cells in 0% Matrigel® in the flank. The cell injection volume was 0.1 mL/mouse. The mice were 8-12 weeks of age at the start of the study. Body weight and caliper measurements were made biweekly to the end of the study. Any individual animal with a single observation of >30% body weight loss or three consecutive measurements of >25% body weight loss was euthanized. Any group with a mean body weight loss of >20% or >10% mortality was not given further dosages. The groups were not euthanized and recovery was allowed. Within a group with >20% weight loss, individuals hitting the individual body weight loss endpoint was euthanized. If the group treatment-related body weight loss was recovered within 10% of the original weight, dosing was resumed at a loser dose or less frequent dosing schedule. Exceptions to non-treatment body weight % recovery were allowed on a case-by-case basis. Animals were monitored individually. The endpoint of the experiment was a tumor volume of 1000 mm³ or 60 days, whichever came first. Responders were followed for a longer period of time. When the endpoint was reached, the animals were euthanized.

[0769] AP1 was prepared as a phosphate-buffered aqueous solution. Paclitaxel was prepared in 5% ethanol and 5% cremaphor EL® in D5W. The vehicle was a phosphate-buffered aqueous solution. The dosing volume was 10 mL/kg (0.2 mL/20 g mouse). The volume was adjusted accordingly for the body weight of each mouse.

[0770] TABLE 16 shows results from the paclitaxel combination therapy efficacy test in MCF-7 subjects using AP1, paclitaxel, and eribulin. After 28 days, the surviving animals were followed to the tumor size endpoint or death.

TABLE 16

| Arm | Treatment A | Treatment B | N | Dosing schedule |
|---|---|---|---|---|
| 1 | Vehicle | Vehicle | 10 | Days 1, 4, 8, 11, 15, 18, 22, 25 |
| 2 | AP1 10 mg/kg | Vehicle | 10 | Days 1, 4, 8, 11, 15, 18, 22, 25 |
| 3 | AP1 5 mg/kg | Vehicle | 10 | Days 1, 4, 8, 11, 15, 18, 22, 25 |
| 4 | Paclitaxel 15 mg/kg | Vehicle | 10 | Days 1, 8, 15, 22 |
| 5 | Paclitaxel 10 mg/kg | Vehicle | 10 | Days 1, 8, 15, 22 |
| 6 | Eribulin 0.1 mg/kg | Vehicle | 10 | Days 1, 8, 15, 22 |
| 7 | AP1 10 mg/kg | Paclitaxel 15 mg/kg | 10 | Days 1, 8, 15, 22: Paclitaxel followed by |
| | | | | AP1 6 h later |
| | | | | Days 4, 11, 18, 25: AP1 only |
| 8 | AP1 5 mg/kg | Paclitaxel 15 mg/kg | 10 | Days 1, 8, 15, 22: Paclitaxel followed by |
| | | | | AP1 6 h later |
| | | | | Days 4, 11, 18, 25: AP1 only |
| 9 | AP1 10 mg/kg | Paclitaxel 10 mg/kg | 10 | Days 1, 8, 15, 22: Paclitaxel followed by |
| | | | | AP1 6 h later |
| | | | | Days 4, 11, 18, 25: AP1 only |
| 10 | AP1 5 mg/kg | Paclitaxel 10 mg/kg | 10 | Days 1, 8, 15, 22: Paclitaxel followed by |
| | | | | AP1 6 h later |
| | | | | Days 4, 11, 18, 25: AP1 only |
| 11 | AP1 10 mg/kg | Eribulin 0.1 mg/kg | 10 | Days 1, 8, 15, 22: Eribulin followed by |
| | | | | AP1 6 h later |
| | | | | Days 4, 11, 18, 25: AP1 only |
| 12 | AP1 5 mg/kg | Eribulin 0.1 mg/kg | 10 | Days 1, 8, 15, 22: Eribulin followed by |
| | | | | AP1 6 h later |
| | | | | Days 4, 11, 18, 25: AP1 only |

[0771] FIG. 74 shows the results of treatment with AP1 or Paclitaxel on individual mouse tumor volume by day. FIG. 75 shows the results of combination treatment with AP1+paclitaxel on individual mouse tumor volume by day. FIG. 76 shows the results of treatment with AP1 or Paclitaxel on individual mouse tumor volume by day on a Log₁₀ axis to show growth. FIG. 77 shows the results of combination treatment with AP1+paclitaxel on individual mouse tumor volume by day on a Log₁₀ axis to show growth. FIG. 78 shows the results of treatment with AP1 or Paclitaxel on individual mouse tumor volume % change from baseline by day. FIG. 79 shows the results of combination treatment with AP1+paclitaxel on individual mouse tumor volume % change from baseline by day.

[0772] FIG. 80 shows the results of treatment with AP1 or Paclitaxel on median tumor volume % change from baseline by day. FIG. 81 shows the results of combination treatment with AP1+paclitaxel on median tumor volume % change from baseline by day. FIG. 82 shows the results of treatment with AP1 or Paclitaxel on average (±1 StDev) tumor volume % change from baseline by day. FIG. 83 shows the results of combination treatment with AP1+paclitaxel on average (±1 StDev) tumor volume % change from baseline by day.

[0773] FIG. 84 compares the results of treatment with AP1, paclitaxel, or combination treatment with AP1+paclitaxel on the average % change in tumor volume from baseline per day. The data show that combination therapy with 5 mg/kg AP1 and 10 mg/kg paclitaxel; or 5 mg/kg AP1 and 15 mg/kg paclitaxel minimized the average % change in tumor volume from baseline for the duration of the study. FIG. 85 compares the results of treatment with AP1, paclitaxel, or combination treatment with AP1+paclitaxel on the average % change in tumor volume from baseline per day. The data show that combination therapy with 10 mg/kg AP1 and 10 mg/kg paclitaxel; or 5 mg/kg AP1 and 15 mg/kg paclitaxel minimized the average % change in tumor volume from baseline for the duration of the study.

[0774] FIG. 86 shows the effect of treatment with AP1, paclitaxel, or combination treatment with AP1+paclitaxel on individual tumor volume % change from baseline on Day 28 per study group. Group 1: control; Group 2: AP110 mg/kg; Group 3: AP1 5 mg/kg; Group 4: paclitaxel 15 mg/kg; Group 5: paclitaxel 10 mg/kg; Group 7: combination treatment AP1 10 mg/kg+paclitaxel 15 mg/kg; Group 8: combination treatment AP1 15 mg/kg+paclitaxel 15 mg/kg; Group 9: combination treatment AP1 10 mg/kg+paclitaxel 10 mg/kg; Group 10: AP1 5 mg/kg+paclitaxel 10 mg/kg. FIG. 87 shows the effect of treatment with AP1, eribulin, or combination treatment with AP1+eribulin on the average % change of tumor volume. Line 1: control; Line 2: combination treatment with AP1 10 mg/kg+eribulin 0.1 mg/kg; Line 3: combination treatment with AP1 5 mg/kg+eribulin 0.1 mg/kg; Line 4: AP1 10 mg/kg; Line 5: AP1 5 mg/kg; Line 6: eribulin 0.1 mg/kg. FIG. 88 shows the effect of treatment with AP1, eribulin, or combination treatment with AP1+eribulin on individual tumor volume? % change from baseline on Day 28. Group 1: control; Group 2: AP1 10 mg/kg; Group 3: AP1 5 mg/kg; Group 6: eribulin 0.1 mg/kg; Group 11: combination treatment with AP1 10 mg/kg+eribulin 0.1 mg/kg; Group 12: combination treatment with AP1 5 mg/kg+eribulin 0.1 mg/kg.

c. Combination Therapy with AP1 and Abraxane®

[0775] Abraxane®, also known as protein-bound paclitaxel or nanoparticle albumin-bound paclitaxel, is an injectable formulation of paclitaxel used to treat breast cancer, lung cancer, and pancreatic cancer. The efficacy of AP1 alone and in combination with Abraxane® was tested in the MCF-7.1 human breast carcinoma xenograft model using female athymic nude mice, following the method used to test the efficacy of AP1 in combination with paclitaxel.

[0776] FIG. 89 shows changes in the normalized body weights of mice treated under various dosing regimens of AP1, Abraxane®, or combination treatment with AP1+Abraxane® over a period of 12 days in the MCF-7.1 human breast carcinoma xenograft model. FIG. 90 shows changes in tumor volumes (mm³) of mice treated under various dosing regimens of AP1, Abraxane®, or combination treatment with AP1+Abraxane® over a period of 12 days in the MCF-7.1 human breast carcinoma xenograft model.

[0777] TABLE 17 shows the dosing regimens used to obtain data on the efficacy of combination treatment using AP1 and Abraxane®.

TABLE 17

| Group # | Dosing |
|---|---|
| Group 1 | vehicle (i.v., days 2, 5, 9, 12, 16, 19, 23, 26) |
| Group 2 | AP1 5 mg/kg (i.v., days 2, 5, 9, 12, 16, 19, 23, 26) |
| Group 3 | Abraxane ® 15 mg/kg (i.v., qwk × 4 starting on day 2) |
| Group 4 | combination treatment with AP1 5 mg/kg (i.v., days 2, 5, 9, |
| | 12, 16, 19, 23, 26) + Abraxane ® 15 mg/kg |
| | (i.v., qwk × 4 starting on day 4) |
| Group 5 | combination treatment with AP1 5 mg/kg (i.v., days 2, 5, 9, 12, |
| | 16, 19, 23, 26; dose 6 hours prior to Abraxane ®) + |
| | Abraxane ® 15 mg/kg (i.v., qwk × 4 starting on day 2) |
| Group 6 | combination treatment with Abraxane ® 15 mg/kg |
| | (i.v., qwk × 4 starting on day 2) + AP1 5 mg/kg (i.v., days 2, 5, |
| | 9, 12, 16, 19, 23, 26; dose 6 hours post-Abraxane ®) |
| Group 7 | Combination treatment with Abraxane ® 15 mg/kg |
| | (i.v., qwk × 4) + AP1 5 mg/kg (i.v., days 2, 5, 9, 12, 16, 19, |
| | 23, 26; dose 24 hours post-Abraxane ®) |
| Group 8 | Combination treatment with AP1 5 mg/kg (i.v., days 2, 5, 9, 12, |
| | 16, 19, 23, 26; dose 24 hours prior to Abraxane ®) + |
| | Abraxane ® 15 mg/kg (i.v., qwk × 4 starting on day 3) |

[0778] The data show that Group 7, Group 6, Group 5, and Group 4 resulted in an overall reduction in tumor volume upon treatment. Group 7 had the highest reduction in tumor volume 5 days after treatment.

### Example 30: Combination Therapy with AP1 and PD-1 or PD-L1 Antagonists

[0779] a. Mice Treated with CloudmanS91 Malignant Melanoma Tumors

[0780] The efficacy of AP1 in combination with murine anti-PD-1, anti-PD-L1, or anti-CTLA-4 was tested in syngeneic mouse models. The murine syngeneic models used for the studies were CT-26 for CTLA-4; CloudmanS91, Colon26, EMT-6, A20, and MC-38 for PD-1; and CloudmanS91, A20, MC-38, and B16F10 for PD-L1.

[0781] AP1 was administered intravenously starting on D1 at dosages of 5 mg/kg, 10 mg/kg, or 20 mg/kg per body weight of each mouse. AP1 was administered 2 times per week for 2 weeks. Anti-PD-1 was administered I.P. on day 3 at a dose of 5 mg/kg, twice a week for two weeks. Anti-PD-L1 was administered I.P. on day 3 at a dose of 5 mg/kg, twice a week for two weeks. Anti-CTLA-4 was administered I.P. on day 3 at a dose of 5 mg/kg, and then at a dose of 2.5 mg/kg on day 6 and day 10. End points were based on tumor volume, body weight, and clinical observations.

[0782] FIG. 91 PANEL A shows the results of vehicle treatment on tumor volumes (mm³) of mice using a CloudmanS91 malignant melanoma model. FIG. 91 PANEL B shows the results of treatment with anti-PD-1 on tumor volumes (mm³) of mice using a CloudmanS91 malignant melanoma model. FIG. 91 PANEL C shows the effect of treatment with twice a week treatment of AP1 at 20 mg/kg on tumor volumes (mm³) of mice using a CloudmanS91 malignant melanoma model. FIG. 91 PANEL D shows the effect of combination treatment with twice a week treatment of AP1 at 20 mg/kg and anti-PD-1 on tumor volumes (mm³) of mice using a CloudmanS91 malignant melanoma model. The dotted line indicates the median tumor volume for the vehicle control.

[0783] FIG. 92 PANEL A shows the results of vehicle treatment on tumor volumes (mm³) of mice using a CloudmanS91 malignant melanoma model. FIG. 92 PANEL B shows the results of treatment with anti-PD-L1 on tumor volumes (mm³) of mice using a CloudmanS91 malignant melanoma model. FIG. 92 PANEL C shows the effect of treatment with twice a week treatment of AP1 at 20 mg/kg on tumor volumes (mm³) of mice using a CloudmanS91 malignant melanoma model. FIG. 92 PANEL D shows the effect of combination treatment with twice a week treatment of AP1 at 20 mg/kg and anti-PD-L1 on tumor volumes (mm³) of mice using a CloudmanS91 malignant melanoma model. The dotted line indicates the median tumor volume for the vehicle control.

b. Mice Treated with A20 Lymphoma

[0784] The efficacy of treatment with AP1 alone and in combination with anti-PD-1 was tested in the A20 murine lymphoma model using female BALB/c mice. Charles River female BALB/c mice were treated subcutaneously in the flank with 1×10⁶ A20 cells in 0% Matrigel®. The cell injection volume was 0.1 mL/mouse. The mice were 8 to 12 weeks of age at the start of the experiment. A pair match was performed when tumors reached an average size of 90-120 mm³, and treatment began. Body weight and caliper measurements were made biweekly throughout the experiment. Dosing volume was 10 mL/kg, and the volume was adjusted accordingly for the body weight of each mouse.

[0785] Any individual animal with a single observation of >30% body weight loss or three consecutive measurements of >25% body weight loss was euthanized. Any group with a mean body weight loss of >20% or >10% mortality was not given further dosages. The groups were not euthanized and recovery was allowed. Within a group with >20% weight loss, individuals hitting the individual body weight loss endpoint was euthanized. If the group treatment-related body weight loss was recovered within 10% of the original weight, dosing was resumed at a loser dose or less frequent dosing schedule. Exceptions to non-treatment body weight % recovery were allowed on a case-by-case basis. Animals were monitored individually. The endpoint of the experiment was a tumor volume of 2000 mm³ or 45 days, whichever came first. Responders were followed for a longer period of time. When the endpoint was reached, the animals were euthanized.

[0786] Anti-PD-1 RMP1-14 (ratIgG) was used to test the efficacy of combination treatment using AP1 and anti-PD-1. TABLE 18 shows the treatment regimens used to test the efficacy of combination treatment using AP1 and anti-PD-1.

TABLE 18

| | | Regimen 1 | | | | Regimen 2 | | | |
|---|---|---|---|---|---|---|---|---|---|
| Gr. | N | Agent | mg/kg | Route | Schedule | Agent | mg/kg | Route | Schedule |
| 1^{#} | 10 | vehicle | — | iv | biwk x 2 (start | PBS | — | ip | biwk x 2 (start |
| | | | | | on day 1) | | | | on day 3) |
| 2 | 10 | anti-PD-1 | 5 | ip | biwk x 2 (start | — | — | — | — |
| | | RMP1-14 | | | on day 3) | | | | |
| 3 | 10 | AR16 | 20 | iv | biwk x 2 (start | — | — | — | — |
| | | | | | on day 1) | | | | |
| 4 | 10 | AR16 | 20 | iv | biwk x 2 (start | — | — | — | — |
| | | | | | on day 3) | | | | |
| 5 | 10 | AR16 | 20 | iv | biwk x 2 (start | — | — | — | — |
| | | | | | on day 5) | | | | |
| 6 | 10 | AR16 | 5 | iv | biwk x 2 (start | anti-PD-1 | 5 | ip | biwk x 2 (start |
| | | | | | on day 1) | RMP1-14 | | | on day 3) |
| 7 | 10 | AR16 | 10 | iv | biwk x 2 (start | anti-PD-1 | 5 | ip | biwk x 2 (start |
| | | | | | on day 1) | RMP1-14 | | | on day 3) |
| 8 | 10 | AR16 | 20 | iv | biwk x 2 (start | anti-PD-1 | 5 | ip | biwk x 2 (start |
| | | | | | on day 1) | RMP1-14 | | | on day 3) |
| 9 | 10 | AR16 | 5 | iv | biwk x 2 (start | anti-PD-1 | 5 | ip | biwk x 2 (start |
| | | | | | on day 3) | RMP1-14 | | | on day 3) |
| 10 | 10 | AR16 | 10 | iv | biwk x 2 (start | anti-PD-1 | 5 | ip | biwk x 2 (start |
| | | | | | on day 3) | RMP1-14 | | | on day 3) |
| 11 | 10 | AR16 | 20 | iv | biwk x 2 (start | anti-PD-1 | 5 | ip | biwk x 2 (start |
| | | | | | on day 3) | RMP1-14 | | | on day 3) |
| 12 | 10 | AR16 | 5 | iv | biwk x 2 (start | anti-PD-1 | 5 | ip | biwk x 2 (start |
| | | | | | on day 5) | RMP1-14 | | | on day 3) |
| 13 | 10 | AR16 | 10 | iv | biwk x 2 (start | anti-PD-1 | 5 | ip | biwk x 2 (start |
| | | | | | on day 5) | RMP1-14 | | | on day 3) |
| 14 | 10 | AR16 | 20 | iv | biwk x 2 (start | anti-PD-1 | 5 | ip | biwk x 2 (start |
| | | | | | on day 5) | RMP1-14 | | | on day 3) |

^{#}control

[0787] FIG. 93 PANEL A shows the results of vehicle treatment on tumor volumes (mm³) of mice using the A20 murine lymphoma model. FIG. 93 PANEL B shows the results of treatment with anti-PD-1 on tumor volumes (mm³) of mice using the A20 murine lymphoma model. FIG. 93 PANEL C shows the effect of treatment with twice a week treatment of AP1 at 20 mg/kg on tumor volumes (mm³) of mice using the A20 murine lymphoma model. FIG. 93 PANEL D shows the effect of combination treatment with twice a week treatment of AP1 at 20 mg/kg and anti-PD-1 on tumor volumes (mm³) of mice using the A20 murine lymphoma model. The dotted line indicates the median tumor volume for the vehicle control.

[0788] Anti-PD-L1 10F.9G2 in PBS was used to test the efficacy of combination treatment using AP1 and anti-PD-L1. The dosing volume for the vehicle and AP1 was 10 mL/kg, and was adjusted accordingly for the body weight of each mouse. The dosing volume for PBS and anti-PD-L1 was 0.2 mL/mouse, and was not adjusted for body weight. TABLE 19 shows the treatment regimens used to test the efficacy of combination treatment using AP1 and anti-PD-L1.

TABLE 19

| | | Regimen 1 | | | | Regimen 2 | | | |
|---|---|---|---|---|---|---|---|---|---|
| Gr. | N | Agent | mg/kg | Route | Schedule | Agent | mg/kg | Route | Schedule |
| 1^{#} | 10 | vehicle | — | iv | biwk x 2 (start | PBS | — | ip | biwk x 2 (start |
| | | | | | on day 1) | | | | on day 3) |
| 2 | 10 | anti-PD-L1 | 100* | ip | biwk x 2 (start | — | — | — | — |
| | | | | | on day 3) | | | | |
| 3 | 10 | AR16 | 20 | iv | biwk x 2 (start | — | — | — | — |
| | | | | | on day 1) | | | | |
| 4 | 10 | AR16 | 20 | iv | biwk x 2 (start | — | — | — | — |
| | | | | | on day 3) | — | — | — | — |
| 5 | 10 | AR16 | 20 | iv | biwk x 2 (start | — | — | — | — |
| | | | | | on day 5) | | | | |
| 6 | 10 | AR16 | 5 | iv | biwk x 2 (start | anti-PDL-1 | 100* | ip | biwk x 2 (start |
| | | | | | on day 1) | | | | on day 3) |
| 7 | 10 | AR16 | 10 | iv | biwk x 2 (start | anti-PDL-1 | 100* | ip | biwk x 2 (start |
| | | | | | on day 1) | | | | on day 3) |
| 8 | 10 | AR16 | 20 | iv | biwk x 2 (start | anti-PDL-1 | 100* | ip | biwk x 2 (start |
| | | | | | on day 1) | | | | on day 3) |
| 9 | 10 | AR16 | 5 | iv | biwk x 2 (start | anti-PDL-1 | 100* | ip | biwk x 2 (start |
| | | | | | on day 3) | | | | on day 3) |
| 10 | 10 | AR16 | 10 | iv | biwk x 2 (start | anti-PDL-1 | 100* | ip | biwk x 2 (start |
| | | | | | on day 3) | | | | on day 3) |
| 11 | 10 | AR16 | 20 | iv | biwk x 2 (start | anti-PDL-1 | 100* | ip | biwk x 2 (start |
| | | | | | on day 3) | | | | on day 3) |
| 12 | 10 | AR16 | 5 | iv | biwk x 2 (start | anti-PDL-1 | 100* | ip | biwk x 2 (start |
| | | | | | on day 5) | | | | on day 3) |
| 13 | 10 | AR16 | 10 | iv | biwk x 2 (start | anti-PDL-1 | 100* | ip | biwk x 2 (start |
| | | | | | on day 5) | | | | on day 3) |
| 14 | 10 | AR16 | 20 | iv | biwk x 2 (start | anti-PDL-1 | 100* | ip | biwk x 2 (start |
| | | | | | on day 5) | | | | on day 3) |

^{#}control
*μg/animal

[0789] FIG. 94 PANEL A shows the results of vehicle treatment on tumor volumes (mm³) of mice using the A20 murine lymphoma model. FIG. 94 PANEL B shows the results of treatment with anti-PD-L1 on tumor volumes (mm³) of mice using the A20 murine lymphoma model. FIG. 94 PANEL C shows the effect of treatment with twice a week treatment of AP1 at 20 mg/kg on tumor volumes (mm³) of mice using the A20 murine lymphoma model. FIG. 94 PANEL D shows the effect of combination treatment with twice a week treatment of AP1 at 20 mg/kg and anti-PD-L1 on tumor volumes (mm³) of mice using the A20 murine lymphoma model. The dotted line indicates the median tumor volume for the vehicle control.

c. Mice Treated with M38 Syngeneic Colon Carcinoma

[0790] The efficacy of AP1 alone and in combination with anti-PD-1 and anti-PD-L1 was tested in the M38 syngeneic colon carcinoma model using C57BL/6 female mice.

[0791] Mice were anesthetized with isoflurane for the implantation of cells to reduce ulcerations. Charles River female C57BL/6 mice were treated subcutaneously in the flank with 5×10⁵ MC38 tumor cells in 0% Matrigel®. The cell injection volume was 0.1 mL/mouse. The mice were 8-12 weeks of age at the beginning of the experiments. A pair match was performed when tumors reached an average size of 80-120 mm³. Body weight and caliper measurements were made biweekly throughout the duration of the experiment.

[0792] Any individual animal with a single observation of >30% body weight loss or three consecutive measurements of >25% body weight loss was euthanized. Any group with a mean body weight loss of >20% or >10% mortality was not given further dosages. The groups were not euthanized and recovery was allowed. Within a group with >20% weight loss, individuals hitting the individual body weight loss endpoint was euthanized. If the group treatment-related body weight loss was recovered within 10% of the original weight, dosing was resumed at a loser dose or less frequent dosing schedule. Exceptions to non-treatment body weight % recovery were allowed on a case-by-case basis. Animals were monitored individually. The endpoint of the experiment was a tumor volume of 1000 mm³ or 45 days, whichever came first. Responders were followed for a longer period of time. When the endpoint was reached, the animals were euthanized.

[0793] Anti-PD-1 RMP1-14 (ratIgG) was used to test the efficacy of combination treatment using AP1 and anti-PD-1. TABLE 20 shows the treatment regimens used to test the efficacy of combination treatment using AP1 and anti-PD-1.

TABLE 20

| | | Regimen 1 | | | | Regimen 2 | | | |
|---|---|---|---|---|---|---|---|---|---|
| Gr. | N | Agent | mg/kg | Route | Schedule | Agent | mg/kg | Route | Schedule |
| 1^{#} | 10 | vehicle | — | iv | biwk x 2 (start | PBS | — | ip | biwk x 2 (start |
| | | | | | on day 1) | | | | on day 3) |
| 2 | 10 | anti-PD-1 | 5 | ip | biwk x 2 (start | — | — | — | — |
| | | RMP1-14 | | | on day 3) | | | | |
| 3 | 10 | AR16 | 20 | iv | biwk x 2 (start | — | — | — | — |
| | | | | | on day 1) | | | | |
| 4 | 10 | AR16 | 20 | iv | biwk x 2 (start | — | — | — | — |
| | | | | | on day 3) | | | | |
| 5 | 10 | AR16 | 20 | iv | biwk x 2 (start | — | — | — | — |
| | | | | | on day 5) | | | | |
| 6 | 10 | AR16 | 5 | iv | biwk x 2 (start | anti-PD-1 | 5 | ip | biwk x 2 (start |
| | | | | | on day 1) | RMP1-14 | | | on day 3) |
| 7 | 10 | AR16 | 10 | iv | biwk x 2 (start | anti-PD-1 | 5 | ip | biwk x 2 (start |
| | | | | | on day 1) | RMP1-14 | | | on day 3) |
| 8 | 10 | AR16 | 20 | iv | biwk x 2 (start | anti-PD-1 | 5 | ip | biwk x 2 (start |
| | | | | | on day 1) | RMP1-14 | | | on day 3) |
| 9 | 10 | AR16 | 5 | iv | biwk x 2 (start | anti-PD-1 | 5 | ip | biwk x 2 (start |
| | | | | | on day 3) | RMP1-14 | | | on day 3) |
| 10 | 10 | AR16 | 10 | iv | biwk x 2 (start | anti-PD-1 | 5 | ip | biwk x 2 (start |
| | | | | | on day 3) | RMP1-14 | | | on day 3) |
| 11 | 10 | AR16 | 20 | iv | biwk x 2 (start | anti-PD-1 | 5 | ip | biwk x 2 (start |
| | | | | | on day 3) | RMP1-14 | | | on day 3) |
| 12 | 10 | AR16 | 5 | iv | biwk x 2 (start | anti-PD-1 | 5 | ip | biwk x 2 (start |
| | | | | | on day 5) | RMP1-14 | | | on day 3) |
| 13 | 10 | AR16 | 10 | iv | biwk x 2 (start | anti-PD-1 | 5 | ip | biwk x 2 (start |
| | | | | | on day 5) | RMP1-14 | | | on day 3) |
| 14 | 10 | AR16 | 20 | iv | biwk x 2 (start | anti-PD-1 | 5 | ip | biwk x 2 (start |
| | | | | | on day 5) | RMP1-14 | | | on day 3) |

^{#}Control group

[0794] FIG. 95 PANEL A shows the results of vehicle treatment on tumor volumes (mm³) of mice using the M38 syngeneic colon carcinoma model. FIG. 95 PANEL B shows the results of treatment with anti-PD-L1 on tumor volumes (mm³) of mice using the M38 syngeneic colon carcinoma model. FIG. 95 PANEL C shows the effect of treatment with twice a week treatment of AP1 at 20 mg/kg on tumor volumes (mm³) of mice using the M38 syngeneic colon carcinoma model. FIG. 95 PANEL D shows the effect of combination treatment with twice a week treatment of AP1 at 20 mg/kg and anti-PD-L1 on tumor volumes (mm³) of mice using the M38 syngeneic colon carcinoma model. The dotted line indicates the median tumor volume for the vehicle control.

[0795] Anti-PD-L1 10F.9G2 in PBS was used to test the efficacy of combination treatment using AP1 and anti-PD-L1. The dosing volume for the vehicle and AP1 was 10 mL/kg, and was adjusted accordingly for the body weight of each mouse. The dosing volume for PBS and anti-PD-L1 was 0.2 mL/mouse, and was not adjusted for body weight. TABLE 21 shows the treatment regimens used to test the efficacy of combination treatment using AP1 and anti-PD-L1.

TABLE 21

| | | Regimen 1 | | | | Regimen 2 | | | |
|---|---|---|---|---|---|---|---|---|---|
| Gr. | N | Agent | mg/kg | Route | Schedule | Agent | mg/kg | Route | Schedule |
| 1^{#} | 10 | vehicle | — | iv | biwk x 2 (start | PBS | — | ip | biwk x 2 (start |
| | | | | | on day 1) | | | | on day 3) |
| 2 | 10 | anti-PDL-1 | 100* | ip | biwk x 2 (start | — | — | — | — |
| | | | | | on day 3) | | | | |
| 3 | 10 | AR16 | 20 | iv | biwk x 2 (start | — | — | — | — |
| | | | | | on day 1) | | | | |
| 4 | 10 | AR16 | 20 | iv | biwk x 2 (start | — | — | — | — |
| | | | | | on day 3) | | | | |
| 5 | 10 | AR16 | 20 | iv | biwk x 2 (start | — | — | — | — |
| | | | | | on day 5) | | | | |
| 6 | 10 | AR16 | 5 | iv | biwk x 2 (start | anti-PDL-1 | 100* | ip | biwk x 2 (start |
| | | | | | on day 1) | | | | on day 3) |
| 7 | 10 | AR16 | 10 | iv | biwk x 2 (start | anti-PDL-1 | 100* | ip | biwk x 2 (start |
| | | | | | on day 1) | | | | on day 3) |
| 8 | 10 | AR16 | 20 | iv | biwk x 2 (start | anti-PDL-1 | 100* | ip | biwk x 2 (start |
| | | | | | on day 1) | | | | on day 3) |
| 9 | 10 | AR16 | 5 | iv | biwk x 2 (start | anti-PDL-1 | 100* | ip | biwk x 2 (start |
| | | | | | on day 3) | | | | on day 3) |
| 10 | 10 | AR16 | 10 | iv | biwk x 2 (start | anti-PDL-1 | 100* | ip | biwk x 2 (start |
| | | | | | on day 3) | | | | on day 3) |
| 11 | 10 | AR16 | 20 | iv | biwk x 2 (start | anti-PDL-1 | 100* | ip | biwk x 2 (start |
| | | | | | on day 3) | | | | on day 3) |
| 12 | 10 | AR16 | 5 | iv | biwk x 2 (start | anti-PDL-1 | 100* | ip | biwk x 2 (start |
| | | | | | on day 5) | | | | on day 3) |
| 13 | 10 | AR16 | 10 | iv | biwk x 2 (start | anti-PDL-1 | 100* | ip | biwk x 2 (start |
| | | | | | on day 5) | | | | on day 3) |
| 14 | 10 | AR16 | 20 | iv | biwk x 2 (start | anti-PDL-1 | 100* | ip | biwk x 2 (start |
| | | | | | on day 5) | | | | on day 3) |

^{#}Control group
*μg/animal

[0796] FIG. 96 PANEL A shows the results of vehicle treatment on tumor volumes (mm³) of mice using the M38 syngeneic colon carcinoma model. FIG. 96 PANEL B shows the results of treatment with anti-PD-L1 on tumor volumes (mm³) of mice using the M38 syngeneic colon carcinoma model. FIG. 96 PANEL C shows the effect of treatment with twice a week treatment of AP1 at 20 mg/kg on tumor volumes (mm³) of mice using the M38 syngeneic colon carcinoma model. FIG. 96 PANEL D shows the effect of combination treatment with twice a week treatment of AP1 at 20 mg/kg and anti-PD-L1 on tumor volumes (mm³) of mice using the M38 syngeneic colon carcinoma model. The dotted line indicates the median tumor volume for the vehicle control.

d. Mice Treated with CT26 Undifferentiated Colon Carcinoma Cell Line

[0797] The efficacy of AP1 alone and in combination with anti-CTLA-4 was tested in the CT26 undifferentiated colon carcinoma cell line in mice.

[0798] FIG. 97 PANEL A shows the results of vehicle treatment on tumor volumes (mm³) of mice using the CT26 undifferentiated colon carcinoma cell line. FIG. 97 PANEL B shows the results of treatment with anti-CTLA-4 9H10 on tumor volumes (mm³) of mice using the CT26 undifferentiated colon carcinoma cell line. FIG. 97 PANEL C shows the effect of treatment with twice a week treatment of AP1 at 20 mg/kg on tumor volumes (mm³) of mice using the CT26 undifferentiated colon carcinoma cell line. FIG. 97 PANEL D shows the effect of combination treatment with twice a week treatment of AP1 at 20 mg/kg and anti-CTLA-4 on tumor volumes (mm³) of mice using the CT26 undifferentiated colon carcinoma cell line. The dotted line indicates the median tumor volume for the vehicle control.

### EMBODIMENTS

[0799] The following non-limiting embodiments provide illustrative examples of the invention, but do not limit the scope of the invention.

### Embodiment 1

[0800] A method of treating cancer in a subject in need thereof, the method comprising administering to the subject a therapeutically effective amount of a peptidomimetic macrocycle and at least one additional pharmaceutically active agent, wherein the at least one additional pharmaceutically active agent:
[0801] (a) is selected from the group consisting of cobimetinib and binimetinib, or
[0802] (b) is a cyclin dependent kinase inhibitor (CDKI) and the CDKI and the peptidomimetic macrocycle are administered with a time separation of more than about 61 minutes;
   wherein the peptidomimetic macrocycle has a Formula:

[chemical structure]

[0803] wherein:
[0804] each of Xaa₃, Xaa₅, Xaa₆, Xaa₇, Xaa₈, Xaa₉, and Xaa₁₀ is individually an amino acid, wherein at least three of Xaa₃, Xaa₅, Xaa₆, Xaa₇, Xaa₈, Xaa₉, and Xaa₁₀ are the same amino acid as the amino acid at the corresponding position of the sequence Phe₃-X₄-His₅-Tyr₆-Trp₇-Ala₈-Gln₉-Leu₁₀-X₁₁-Ser₁₂ (SEQ ID NO: 8), wherein each X is an amino acid;
[0805] each D and E is independently an amino acid;
[0806] R₁ and R₂ are independently —H, alkyl, alkenyl, alkynyl, arylalkyl, cycloalkyl, cycloalkylalkyl, heteroalkyl, or heterocycloalkyl, unsubstituted or substituted with halo-; or at least one of R₁ and R₂ forms a macrocycle-forming linker L′ connected to the alpha position of one of said D or E amino acids;
[0807] each L and L′ is independently a macrocycle-forming linker of the formula -L₁-L₂-;
[0808] each L₁ and L₂ is independently alkylene, alkenylene, alkynylene, heteroalkylene, cycloalkylene, heterocycloalkylene, arylene, heteroarylene, or [—R₄—K—R₄-]ₙ, each being optionally substituted with R₅;
[0809] each R₄ is independently alkylene, alkenylene, alkynylene, heteroalkylene, cycloalkylene, heterocycloalkylene, arylene, or heteroarylene;
[0810] each K is independently O, S, SO, SO₂, CO, CO₂, or CONR₃;
[0811] each R₅ is independently halogen, alkyl, —OR₆, —N(R₆)₂, —SR₆, —SOR₆, —SO₂R₆, —CO₂R₆, a fluorescent moiety, a radioisotope or a therapeutic agent;
[0812] each R₆ is independently —H, alkyl, alkenyl, alkynyl, arylalkyl, cycloalkylalkyl, heterocycloalkyl, a fluorescent moiety, a radioisotope or a therapeutic agent;
[0813] R₇ is —H, alkyl, alkenyl, alkynyl, arylalkyl, cycloalkyl, heteroalkyl, cycloalkylalkyl, heterocycloalkyl, aryl, or heteroaryl, optionally substituted with R₅, or part of a cyclic structure with a D residue;
[0814] R₈ is —H, alkyl, alkenyl, alkynyl, arylalkyl, cycloalkyl, heteroalkyl, cycloalkylalkyl, heterocycloalkyl, aryl, or heteroaryl, optionally substituted with R₅, or part of a cyclic structure with an E residue;
[0815] v is an integer from 1-1000;
[0816] w is an integer from 3-1000; and
[0817] n is an integer from 1-5.

### Embodiment 2

[0818] A method of treating cancer in a subject in need thereof, the method comprising administering to the subject a therapeutically effective amount of a peptidomimetic macrocycle and at least one additional pharmaceutically active, wherein the at least one additional pharmaceutically active agent:
[0819] (a) is selected from the group consisting of cobimetinib and binimetinib, or
[0820] (b) is a cyclin dependent kinase inhibitor (CDKI) and the CDKI and the peptidomimetic macrocycle are administered with a time separation of more than about 61 minutes;
   wherein the peptidomimetic macrocycle has a Formula:

[chemical structure]

wherein:
[0821] each of Xaa₃, Xaa₅, Xaa₆, Xaa₇, Xaa₈, Xaa₉, and Xaa₁₀ is individually an amino acid, wherein at least three of Xaa₃, Xaa₅, Xaa₆, Xaa₇, Xaa₈, Xaa₉, and Xaa₁₀ are the same amino acid as the amino acid at the corresponding position of the sequence Phe₃-X₄-Glu₅-Tyr₆-Trp₇-Ala₈-Gln₉-Leu₁₀/Cba₁₀-X₁₁-Ala₁₂ (SEQ ID NO: 9), wherein each X is an amino acid;
[0822] each D and E is independently an amino acid;
[0823] R₁ and R₂ are independently —H, alkyl, alkenyl, alkynyl, arylalkyl, cycloalkyl, cycloalkylalkyl, heteroalkyl, or heterocycloalkyl, unsubstituted or substituted with halo-; or at least one of R₁ and R₂ forms a macrocycle-forming linker L′ connected to the alpha position of one of said D or E amino acids;
[0824] each L and L′ is independently a macrocycle-forming linker of the formula -L₁-L₂-;
[0825] each L₁ and L₂ is independently alkylene, alkenylene, alkynylene, heteroalkylene, cycloalkylene, heterocycloalkylene, arylene, heteroarylene, or [—R₄—K—R₄-]ₙ, each being optionally substituted with R₅;
[0826] each R₄ is independently alkylene, alkenylene, alkynylene, heteroalkylene, cycloalkylene, heterocycloalkylene, arylene, or heteroarylene;
[0827] each K is independently O, S, SO, SO₂, CO, CO₂, or CONR₃;
[0828] each R₅ is independently halogen, alkyl, —OR₆, —N(R₆)₂, —SR₆, —SOR₆, —SO₂R₆, —CO₂R₆, a fluorescent moiety, a radioisotope or a therapeutic agent;
[0829] each R₆ is independently —H, alkyl, alkenyl, alkynyl, arylalkyl, cycloalkylalkyl, heterocycloalkyl, a fluorescent moiety, a radioisotope or a therapeutic agent;
[0830] R₇ is —H, alkyl, alkenyl, alkynyl, arylalkyl, cycloalkyl, heteroalkyl, cycloalkylalkyl, heterocycloalkyl, aryl, or heteroaryl, optionally substituted with R₅, or part of a cyclic structure with a D residue;
[0831] R₈ is —H, alkyl, alkenyl, alkynyl, arylalkyl, cycloalkyl, heteroalkyl, cycloalkylalkyl, heterocycloalkyl, aryl, or heteroaryl, optionally substituted with R₅, or part of a cyclic structure with an E residue;
[0832] v is an integer from 1-1000;
[0833] w is an integer from 3-1000; and
[0834] n is an integer from 1-5.

### Embodiment 3

[0835] The method of embodiments 1 or 2, wherein the peptidomimetic macrocycle has improved binding affinity to MDM2 or MDMX relative to a corresponding peptidomimetic macrocycle wherein w is 0, 1 or 2.

### Embodiment 4

[0836] The method of embodiments 1 or 2, wherein the peptidomimetic macrocycle has a reduced ratio of binding affinities to MDMX versus MDM2 relative to a corresponding peptidomimetic macrocycle wherein w is 0, 1, or 2.

### Embodiment 5

[0837] The method of any one of embodiment 1-4, wherein the peptidomimetic macrocycle has improved in vitro anti-tumor efficacy against p53 positive tumor cell lines relative to a corresponding peptidomimetic macrocycle wherein w is 0, 1, or 2.

### Embodiment 6

[0838] The method of any one of embodiments 1-5, wherein the peptidomimetic macrocycle shows improved in vitro induction of apoptosis in p53 positive tumor cell lines relative to a corresponding peptidomimetic macrocycle wherein w is 0, 1, or 2.

### Embodiment 7

[0839] The method of any one of embodiments 1-6, wherein the peptidomimetic macrocycle has an improved in vitro anti-tumor efficacy ratio for p53 positive versus p53 negative or mutant tumor cell lines relative to a corresponding peptidomimetic macrocycle wherein w is 0, 1, or 2.

### Embodiment 8

[0840] The method of any one of embodiments 1-6, wherein the peptidomimetic macrocycle has improved in vivo anti-tumor efficacy against p53 positive tumors relative to a corresponding peptidomimetic macrocycle wherein w is 0, 1, or 2.

### Embodiment 9

[0841] The method of any one of embodiments 1-8, wherein the peptidomimetic macrocycle has improved cell permeability relative to a corresponding peptidomimetic macrocycle wherein w is 0, 1, or 2.

### Embodiment 10

[0842] The method of any one of embodiments 1-9, wherein the peptidomimetic macrocycle has improved solubility relative to a corresponding peptidomimetic macrocycle wherein w is 0, 1, or 2.

### Embodiment 11

[0843] The method of any one of embodiments 1-10, wherein Xaa₅ is Glu or an amino acid analogue thereof.

### Embodiment 12

[0844] The method of any one of embodiments 1-11, wherein Xaa₅ is Glu or an amino acid analogue thereof and wherein the peptidomimetic macrocycle has an improved binding affinity, improved solubility, improved cellular efficacy, improved helicity, improved cell permeability, improved in vivo or in vitro anti-tumor efficacy, or improved induction of apoptosis relative to a corresponding peptidomimetic macrocycle wherein Xaa₅ is Ala.

[0845] Embodiment 13 The method of any one of embodiments 1-12, wherein each E is independently an amino acid selected from Ala (alanine), D-Ala (D-alanine), Aib (α-aminoisobutyric acid), Sar (N-methyl glycine), and Ser (serine).

### Embodiment 14

[0846] The method of any one of embodiments 1-13, wherein [D]ᵥ is -Leu₁-Thr₂.

### Embodiment 15

[0847] The method of any one of embodiments 1-14, wherein w is 3-10.

### Embodiment 16

[0848] The method of any one of embodiments 1-15, wherein w is 3-6.

### Embodiment 17

[0849] The method of any one of embodiments 1-15, wherein w is 6-10.

### Embodiment 18

[0850] The method of any one of embodiments 1-17, wherein w is 6.

### Embodiment 19

[0851] The method of any one of any one of embodiments 1-18, wherein v is 1-10.

### Embodiment 20

[0852] The method of any one of embodiments 1-19, wherein v is 2-10.

### Embodiment 21

[0853] The method of any one of embodiments 1-20, wherein v is 2-5.

### Embodiment 22

[0854] The method of any one of embodiments 1-21, wherein v is 2.

### Embodiment 23

[0855] A method of treating cancer in a subject in need thereof, the method comprising administering to the subject a therapeutically effective amount of a peptidomimetic macrocycle and at least one additional pharmaceutically active agent, wherein the at least one additional pharmaceutically active agent:
[0856] (a) is selected from the group consisting of cobimetinib and binimetinib, or
[0857] (b) is a cyclin dependent kinase inhibitor (CDKI) and the CDKI and the peptidomimetic macrocycle are administered with a time separation of more than about 61 minutes;

[0858] wherein the peptidomimetic macrocycle comprises an amino acid sequence which is at least about 60% identical to an amino acid sequence chosen from the group consisting of the amino acid sequences in Table 1, Table 1a, Table 1b, or Table 1c and wherein the peptidomimetic macrocycle has the formula:

[chemical structure]

wherein:
[0859] each A, C, D, and E is independently an amino acid;
[0860] each B is independently an amino acid, amino acid analogue,

[chemical structure]

[—NH-L₃-CO—], [—NH-L₃-SO₂—], or [—NH-L₃-];
[0861] each R₁ and R₂ is independently —H, alkyl, alkenyl, alkynyl, arylalkyl, cycloalkyl, cycloalkylalkyl, heteroalkyl, or heterocycloalkyl, unsubstituted or substituted with halo-; or at least one of R₁ and R₂ forms a macrocycle-forming linker L′ connected to the alpha position of one of said D or E amino acids;
[0862] each R₃ is independently hydrogen, alkyl, alkenyl, alkynyl, arylalkyl, heteroalkyl, cycloalkyl, heterocycloalkyl, cycloalkylalkyl, aryl, or heteroaryl, optionally substituted with R₅;
[0863] each L and L′ is independently a macrocycle-forming linker of the formula -L₁-L₂-;
[0864] each L₁, L₂, and L₃ is independently alkylene, alkenylene, alkynylene, heteroalkylene, cycloalkylene, heterocycloalkylene, arylene, heteroarylene, or [—R₄—K—R₄-]ₙ, each being optionally substituted with R₅;
[0865] each R₄ is independently alkylene, alkenylene, alkynylene, heteroalkylene, cycloalkylene, heterocycloalkylene, arylene, or heteroarylene;
[0866] each K is independently O, S, SO, SO₂, CO, CO₂, or CONR₃;
[0867] each R₅ is independently halogen, alkyl, —OR₆, —N(R₆)₂, —SR₆, —SOR₆, —SO₂R₆, —CO₂R₆, a fluorescent moiety, a radioisotope or a therapeutic agent;
[0868] each R₆ is independently —H, alkyl, alkenyl, alkynyl, arylalkyl, cycloalkylalkyl, heterocycloalkyl, a fluorescent moiety, a radioisotope or a therapeutic agent;
[0869] each R₇ is independently —H, alkyl, alkenyl, alkynyl, arylalkyl, cycloalkyl, heteroalkyl, cycloalkylalkyl, heterocycloalkyl, aryl, or heteroaryl, optionally substituted with R₅, or part of a cyclic structure with a D residue;
[0870] each R₈ is independently —H, alkyl, alkenyl, alkynyl, arylalkyl, cycloalkyl, heteroalkyl, cycloalkylalkyl, heterocycloalkyl, aryl, or heteroaryl, optionally substituted with R₅, or part of a cyclic structure with an E residue;
[0871] each v and w is independently an integer from 1-1000;
[0872] u is an integer from 1-10;
[0873] each x, y, and z is independently an integer from 0-10;
[0874] n is an integer from 1-5; and
   wherein the peptidomimetic macrocycle is not a peptidomimetic macrocycle of Tables 2a or 2b.

### Embodiment 24

[0875] A method of treating cancer in a subject in need thereof, the method comprising administering to the subject a therapeutically effective amount of a peptidomimetic macrocycle and at least one additional pharmaceutically active agent, wherein the at least one additional pharmaceutically active agent:
[0876] (a) is selected from the group consisting of cobimetinib and binimetinib, or
[0877] (b) is a cyclin dependent kinase inhibitor (CDKI) and the CDKI and the peptidomimetic macrocycle are administered with a time separation of more than about 61 minutes;

[0878] wherein the peptidomimetic macrocycle comprises an amino acid sequence which is at least about 60% identical to an amino acid sequence chosen from the group consisting of the amino acid sequences in Table 1, Table 1a, Table 1b, or Table 1c, wherein the peptidomimetic macrocycle has the formula:

[chemical structure]

wherein:
[0879] each A, C, D, and E is independently an amino acid;
[0880] each B is independently an amino acid, amino acid analogue,

[chemical structure]

[—NH-L₃-CO—], [—NH-L₃-SO₂—], or [—NH-L₃-];
[0881] each R₁ and R₂ is independently —H, alkyl, alkenyl, alkynyl, arylalkyl, cycloalkyl, cycloalkylalkyl, heteroalkyl, or heterocycloalkyl, unsubstituted or substituted with halo-; or at least one of R₁ and R₂ forms a macrocycle-forming linker L′ connected to the alpha position of one of said D or E amino acids;
[0882] each R₃ is independently hydrogen, alkyl, alkenyl, alkynyl, arylalkyl, heteroalkyl, cycloalkyl, heterocycloalkyl, cycloalkylalkyl, aryl, or heteroaryl, optionally substituted with R₅;
[0883] each L and L′ is independently a macrocycle-forming linker of the formula -L₁-L₂-;
[0884] each L₁, L₂, and L₃ is independently alkylene, alkenylene, alkynylene, heteroalkylene, cycloalkylene, heterocycloalkylene, arylene, heteroarylene, or [—R₄—K—R₄-]ₙ, each being optionally substituted with R₅;
[0885] each R₄ is independently alkylene, alkenylene, alkynylene, heteroalkylene, cycloalkylene, heterocycloalkylene, arylene, or heteroarylene;
[0886] each K is independently O, S, SO, SO₂, CO, CO₂, or CONR₃;
[0887] each R₅ is independently halogen, alkyl, —OR₆, —N(R₆)₂, —SR₆, —SOR₆, —SO₂R₆, —CO₂R₆, a fluorescent moiety, a radioisotope or a therapeutic agent;
[0888] each R₆ is independently —H, alkyl, alkenyl, alkynyl, arylalkyl, cycloalkylalkyl, heterocycloalkyl, a fluorescent moiety, a radioisotope or a therapeutic agent;
[0889] each R₇ is independently —H, alkyl, alkenyl, alkynyl, arylalkyl, cycloalkyl, heteroalkyl, cycloalkylalkyl, heterocycloalkyl, aryl, or heteroaryl, optionally substituted with R₅, or part of a cyclic structure with a D residue;
[0890] each R₈ is independently —H, alkyl, alkenyl, alkynyl, arylalkyl, cycloalkyl, heteroalkyl, cycloalkylalkyl, heterocycloalkyl, aryl, or heteroaryl, optionally substituted with R₅, or part of a cyclic structure with an E residue;
[0891] each v and w is independently an integer from 1-1000;
[0892] u is an integer from 1-10;
[0893] each x, y, and z is independently an integer from 0-10;
[0894] n is an integer from 1-5;
[0895] wherein w>2 and each of the first two amino acid represented by E comprises an uncharged side chain or a negatively charged side chain,
[0896] with the proviso that the peptidomimetic macrocycle is not a peptidomimetic macrocycle of Table 2a and does not have the sequence:

(SEQ ID NO: 762)
Ac-RTQATF$r8NQWAibANle$TNAibTR-NH₂,
(SEQ ID NO: 813)
Ac-Sr8SQQTFS$LWRLLAibQN-NH₂,
(SEQ ID NO: 814)
Ac-QSQ$r8TFSNLW$LLAibQN-NH₂,
(SEQ ID NO: 816)
Ac-QS$r5QTFStNLW$LLAibQN-NH₂,
or
(SEQ ID NO: 896)
Ac-QSQQ$r8FSNLWR$LAibQN-NH₂,

wherein Aib represents 2-aminoisobutyric acid, $ represents an alpha-Me S5-pentenyl-alanine olefin amino acid connected to another amino acid side chain by an all-carbon crosslinker comprising one double bond, $r5 represents an alpha-Me R₅-pentenyl-alanine olefin amino acid connected to another amino acid side chain by an all-carbon comprising one double bond, and $r8 represents an alpha-Me R₈-octenyl-alanine olefin amino acid connected to another amino acid side chain by an all-carbon crosslinker comprising one double bond.

### Embodiment 25

[0897] The method of embodiments 24 or 25, wherein each E is independently an amino acid selected from Ala (alanine), D-Ala (D-alanine), Aib (α-aminoisobutyric acid), Sar (N-methyl glycine), and Ser (serine).

### Embodiment 26

[0898] The method of any one of embodiments 24-25, wherein the first C-terminal amino acid and/or the second C-terminal amino acid represented by E comprise a hydrophobic side chain.

### Embodiment 27

[0899] The method of embodiment 27, wherein the hydrophobic chain is a large hydrophobic side chain.

### Embodiment 28

[0900] A method of treating cancer in a subject in need thereof, the method comprising administering to the subject a therapeutically effective amount of a peptidomimetic macrocycle and at least one additional pharmaceutically active agent, wherein the at least one additional pharmaceutically active agent:
[0901] (a) is selected from the group consisting of cobimetinib and binimetinib, or
[0902] (b) is a cyclin dependent kinase inhibitor (CDKI) and the CDKI and the peptidomimetic macrocycle are administered with a time separation of more than about 61 minutes;

[0903] wherein the peptidomimetic macrocycle comprises an amino acid sequence which is at least about 60% identical to an amino acid sequence chosen from the group consisting of the amino acid sequences in Table 1, Table 1a, Table 1b, or Table 1c, wherein the peptidomimetic macrocycle has the formula:

[chemical structure]

[0904] wherein:
[0905] each A, C, D, and E is independently an amino acid;
[0906] each B is independently an amino acid, amino acid analogue,

[chemical structure]

[—NH-L₃-CO—], [—NH-L₃-SO₂—], or [—NH-L₃-];
[0907] each R₁ and R₂ is independently —H, alkyl, alkenyl, alkynyl, arylalkyl, cycloalkyl, cycloalkylalkyl, heteroalkyl, or heterocycloalkyl, unsubstituted or substituted with halo-; or at least one of R₁ and R₂ forms a macrocycle-forming linker L′ connected to the alpha position of one of said D or E amino acids;
[0908] each R₃ is independently hydrogen, alkyl, alkenyl, alkynyl, arylalkyl, heteroalkyl, cycloalkyl, heterocycloalkyl, cycloalkylalkyl, aryl, or heteroaryl, optionally substituted with R₅;
[0909] each L and L′ is independently a macrocycle-forming linker of the formula -L₁-L₂-;
[0910] each L₁, L₂, and L₃ is independently alkylene, alkenylene, alkynylene, heteroalkylene, cycloalkylene, heterocycloalkylene, arylene, heteroarylene, or [—R₄—K—R₄-]ₙ, each being optionally substituted with R₅;
[0911] each R₄ is independently alkylene, alkenylene, alkynylene, heteroalkylene, cycloalkylene, heterocycloalkylene, arylene, or heteroarylene;
[0912] each K is independently O, S, SO, SO₂, CO, CO₂, or CONR₃;
[0913] each R₅ is independently halogen, alkyl, —OR₆, —N(R₆)₂, —SR₆, —SOR₆, —SO₂R₆, —CO₂R₆, a fluorescent moiety, a radioisotope or a therapeutic agent;
[0914] each R₆ is independently —H, alkyl, alkenyl, alkynyl, arylalkyl, cycloalkylalkyl, heterocycloalkyl, a fluorescent moiety, a radioisotope or a therapeutic agent;
[0915] each R₇ is independently —H, alkyl, alkenyl, alkynyl, arylalkyl, cycloalkyl, heteroalkyl, cycloalkylalkyl, heterocycloalkyl, aryl, or heteroaryl, optionally substituted with R₅, or part of a cyclic structure with a D residue;
[0916] each R₅ is independently —H, alkyl, alkenyl, alkynyl, arylalkyl, cycloalkyl, heteroalkyl, cycloalkylalkyl, heterocycloalkyl, aryl, or heteroaryl, optionally substituted with R₅, or part of a cyclic structure with an E residue;
[0917] each v and w is independently an integer from 1-1000;
[0918] u is an integer from 1-10;
[0919] each x, y, and z is independently an integer from 0-10;
[0920] n is an integer from 1-5; and
[0921] w>2,

[0922] wherein the third amino acid represented by E comprises a large hydrophobic side chain, with the proviso that the peptidomimetic macrocycle is not a peptidomimetic macrocycle of Table 2a and does not have the sequence of: Ac-Q$r8QQTFSN$WRLLAibQN-NH₂ (SEQ ID NO: 895).

### Embodiment 29

[0923] The method of embodiment 28, wherein each E other than the third amino acid represented by E is an amino acid selected from Ala (alanine), D-Ala (D-alanine), Aib (α-aminoisobutyric acid), Sar (N-methyl glycine), and Ser (serine).

### Embodiment 30

[0924] The method of any one of embodiments 23-29, wherein w is 3-10.

### Embodiment 31

[0925] The method of any one of embodiments 23-30, wherein w is 3-6.

### Embodiment 32

[0926] The method of any one of embodiments 23-29, wherein w is 6-10.

### Embodiment 33

[0927] The method of any one of embodiments 23-32, wherein w is 6.

### Embodiment 34

[0928] The method of any one of embodiments 24-33, wherein v is 1-10.

### Embodiment 35

[0929] The method of any one of embodiments 23-34, wherein v is 3-10.

### Embodiment 36

[0930] The method of any one of embodiments 23-35, wherein v is 3-5.

### Embodiment 37

[0931] The method of any one of embodiments 23-36, wherein v is 3.

### Embodiment 38

[0932] The method of any one of embodiments 34-37, wherein [D]ᵥ is -Leu₁-Thr₂-Phe₃.

### Embodiment 39

[0933] The method of any one of embodiments 28-38, wherein each of the first two amino acid represented by E comprises an uncharged side chain or a negatively charged side chain.

### Embodiment 40

[0934] The method of any one of embodiments 28-38, wherein the third amino acid represented by E is an amino acid selected from the group consisting of: isoleucine (I), leucine (L), methionine (M), phenylalanine (F), tryptophan (W), and tyrosine (Y).

### Embodiment 41

[0935] The method of any one of embodiments 1-40, wherein L₁ and L₂ are independently alkylene, alkenylene, alkynylene, heteroalkylene, cycloalkylene, heterocycloalkylene, arylene, or heteroarylene, each being optionally substituted with R₅.

### Embodiment 42

[0936] The method of any one of embodiments 1-40, wherein L₁ and L₂ are independently alkylene or alkenylene.

### Embodiment 43

[0937] The method of any one of embodiments 1-40, wherein L is alkylene, alkenylene, or alkynylene.

### Embodiment 44

[0938] The method of any one of embodiments 1-43, wherein L is alkylene.

### Embodiment 45

[0939] The method of any one of embodiments 1-44, wherein L is C₃-C₁₆ alkylene.

### Embodiment 46

[0940] The method of any one of embodiments 1-44, wherein L is C₁₀-C₁₄ alkylene.

### Embodiment 47

[0941] The method of any one of embodiments 1-46, wherein R₁ and R₂ are independently —H, alkyl, alkenyl, alkynyl, arylalkyl, cycloalkyl, cycloalkylalkyl, heteroalkyl, or heterocycloalkyl, unsubstituted or substituted with halo.

### Embodiment 48

[0942] The method of any one of embodiments 1-47, wherein R₁ and R₂ are H.

### Embodiment 49

[0943] The method of any one of embodiments 1-48, wherein R₁ and R₂ are independently alkyl.

### Embodiment 50

[0944] The method of any one of embodiments 1-49, wherein R₁ and R₂ are methyl.

### Embodiment 51

[0945] The method of any one of embodiments 1-50, wherein x+y+z=6.

### Embodiment 52

[0946] The method of any one of embodiments 1-51, wherein u is 1.

### Embodiment 53

[0947] The method of any one of embodiments 1-52, wherein the peptidomimetic macrocycle is not a macrocycle of Table 2a or Table 2b.

### Embodiment 54

[0948] The method of any one of embodiments 1-53, wherein each E is Ser or Ala or an analogue thereof.

### Embodiment 55

[0949] The method of any one of embodiments 1-54, wherein the peptidomimetic macrocycle comprises at least one amino acid which is an amino acid analogue.

### Embodiment 56

[0950] A method of treating cancer in a subject in need thereof, the method comprising administering to the subject

[0951] (a) a therapeutically effective amount of a p53 agent that
[0952] (i) inhibits the interaction between p53 and MDM2 and/or p53 and MDMX, and/or
[0953] (ii) modulates the activity of p53 and/or MDM2 and/or MDMX; and

[0954] (b) at least one additional pharmaceutically active agent, wherein the at least one additional pharmaceutically active agent
[0955] (i) modulates the activity of CDK4 and/or CDK6, and/or
[0956] (ii) inhibits CDK4 and/or CDK6;
   wherein the at least one additional pharmaceutically active agent and the peptidomimetic macrocycle are administered with a time separation of more than about 61 minutes.

### Embodiment 57

[0957] The method of embodiment 56, wherein the p53 agent antagonizes an interaction between p53 and MDM2 proteins and/or between p53 and MDMX proteins.

### Embodiment 58

[0958] The method of embodiments 56 or 57, wherein the at least one additional pharmaceutically active agent binds to CDK4 and/or CDK6.

### Embodiment 59

[0959] The method of any one of embodiments 56-58, wherein the p53 agent is selected from the group consisting of a small organic or inorganic molecule; a saccharine; an oligosaccharide; a polysaccharide; a peptide, a protein, a peptide analogue, a peptide derivative; an antibody, an antibody fragment, a peptidomimetic; a peptidomimetic macrocycle of any one of embodiments 1-55 a nucleic acid; a nucleic acid analogue, a nucleic acid derivative; an extract made from biological materials; a naturally occurring or synthetic composition; and any combination thereof.

### Embodiment 60

[0960] The method of any one of embodiments 56-59, wherein the p53 agent is selected from the group consisting of RG7388 (RO5503781, idasanutlin); RG7112 (RO5045337); nutlin3a; nutlin3b; nutlin3; nutlin2; spirooxindole containing small molecules; 1,4-diazepines; 1,4-benzodiazepine-2,5-dione compounds; WK23; WK298; SJ172550; RO2443; RO5963; RO5353; RO2468; MK8242 (SCH900242); MI888; MI773 (SAR405838); NVPCGM097; DS3032b; AM8553; AMG232; NSC207895 (XI006); JNJ26854165 (serdemetan); RITA (NSC652287); YH239EE; and any combination thereof.

### Embodiment 61

[0961] The method of any one of embodiments 56-60, wherein the at least one additional pharmaceutically active agent is selected from the group consisting of a small organic or inorganic molecule; a saccharine; an oligosaccharide; a polysaccharide; a peptide, a protein, a peptide analogue, a peptide derivative; an antibody, an antibody fragment, a peptidomimetic; a peptidomimetic macrocycle of any one of embodiments 1-55; a nucleic acid; a nucleic acid analogue, a nucleic acid derivative; an extract made from biological materials; a naturally occurring or synthetic composition; and any combination thereof.

### Embodiment 62

[0962] The method of any one of embodiments 1-61, wherein the at least one additional pharmaceutically active agent is selected from the group consisting of palbociclib (PD0332991); abemaciclib (LY2835219); ribociclib (LEE 011); voruciclib (P1446A-05); fascaplysin; arcyriaflavin; 2-bromo-12,13-dihydro-5H-indolo[2,3-a]pyrrolo[3,4-c]carbazole-5,7(6H)-dione; 3-amino thioacridone (3-ATA), trans-4-((6-(ethylamino)-2-((1-(phenylmethyl)-1H-indol-5-yl)amino)-4-pyrimidinyl)amino)-cyclohexano (CINK4); 1,4-dimethoxyacridine-9(10H)-thione (NSC 625987); 2-methyl-5-(p-tolylamino)benzo[d]thiazole-4,7-dione (ryuvidine); and flavopiridol (alvocidib); seliciclib; dinaciclib; milciclib; roniciclib; atuveciclib; briciclib; riviciclib; trilaciclib (G1T28); and any combination thereof.

### Embodiment 63

[0963] The method of embodiments 1 or 2, wherein the peptidomimetic macrocycle is (SEQ ID NO: 163)

[chemical structure]

or a pharmaceutically acceptable salt thereof.

### Embodiment 64

[0964] The method of embodiments 1 or 2, wherein the peptidomimetic macrocycle is (SEQ ID NO: 124)

[chemical structure]

or a pharmaceutically acceptable salt thereof.

### Embodiment 65

[0965] The method of embodiments 1 or 2, wherein the peptidomimetic macrocycle is (SEQ ID NO: 123):

[chemical structure]

or a pharmaceutically acceptable salt thereof.

### Embodiment 66

[0966] The method of embodiments 1 or 2, wherein the peptidomimetic macrocycle is (SEQ ID NO: 108)

[chemical structure]

or a pharmaceutically acceptable salt thereof.

### Embodiment 67

[0967] The method of embodiments 1 or 2, wherein the peptidomimetic macrocycle is (SEQ ID NO: 397)

[chemical structure]

or a pharmaceutically acceptable salt thereof.

### Embodiment 68

[0968] The method of embodiments 1 or 2, wherein the peptidomimetic macrocycle is (SEQ ID NO: 340)

[chemical structure]

or a pharmaceutically acceptable salt thereof.

### Embodiment 69

[0969] The method of embodiments 1 or 2, wherein the peptidomimetic macrocycle is (SEQ ID NO: 454)

[chemical structure]

or a pharmaceutically acceptable salt thereof.

### Embodiment 70

[0970] The method of embodiments 1 or 2, wherein the peptidomimetic macrocycle is (SEQ ID NO: 360)

[chemical structure]

or a pharmaceutically acceptable salt thereof.

### Embodiment 71

[0971] The method of embodiments 1 or 2, wherein the peptidomimetic macrocycle is (SEQ ID NO: 80)

[chemical structure]

or a pharmaceutically acceptable salt thereof.

### Embodiment 72

[0972] The method of embodiments 1 or 2, wherein the peptidomimetic macrocycle is (SEQ ID NO: 78)

[chemical structure]

or a pharmaceutically acceptable salt thereof.

### Embodiment 73

[0973] The method of embodiments 1 or 2, wherein the peptidomimetic macrocycle is (SEQ ID NO: 16)

[chemical structure]

or a pharmaceutically acceptable salt thereof.

### Embodiment 74

[0974] The method of embodiments 1 or 2, wherein the peptidomimetic macrocycle is (SEQ ID NO: 169)

[chemical structure]

or a pharmaceutically acceptable salt thereof.

### Embodiment 75

[0975] The method of embodiments 1 or 2, wherein the peptidomimetic macrocycle is (SEQ ID NO: 324)

[chemical structure]

or a pharmaceutically acceptable salt thereof.

### Embodiment 76

[0976] The method of embodiments 1 or 2, wherein the peptidomimetic macrocycle is (SEQ ID NO: 258)

[chemical structure]

or a pharmaceutically acceptable salt thereof.

### Embodiment 77

[0977] The method of embodiments 1 or 2, wherein the peptidomimetic macrocycle is (SEQ ID NO: 446)

[chemical structure]

or a pharmaceutically acceptable salt thereof.

### Embodiment 78

[0978] The method of embodiments 1 or 2, wherein the peptidomimetic macrocycle is (SEQ ID NO: 358)

[chemical structure]

or a pharmaceutically acceptable salt thereof.

### Embodiment 79

[0979] The method of embodiments 1 or 2, wherein the peptidomimetic macrocycle is (SEQ ID NO: 464)

[chemical structure]

or a pharmaceutically acceptable salt thereof.

### Embodiment 80

[0980] The method of embodiments 1 or 2, wherein the peptidomimetic macrocycle is (SEQ ID NO: 466)

[chemical structure]

or a pharmaceutically acceptable salt thereof.

### Embodiment 81

[0981] The method of embodiments 1 or 2, wherein the peptidomimetic macrocycle is (SEQ ID NO: 467)

[chemical structure]

or a pharmaceutically acceptable salt thereof.

### Embodiment 82

[0982] The method of embodiments 1 or 2, wherein the peptidomimetic macrocycle is (SEQ ID NO: 376)

[chemical structure]

or a pharmaceutically acceptable salt thereof.

### Embodiment 83

[0983] The method of embodiments 1 or 2, wherein the peptidomimetic macrocycle is (SEQ ID NO: 471)

[chemical structure]

or a pharmaceutically acceptable salt thereof.

### Embodiment 84

[0984] The method of embodiments 1 or 2, wherein the peptidomimetic macrocycle is (SEQ ID NO: 473)

[chemical structure]

or a pharmaceutically acceptable salt thereof.

### Embodiment 85

[0985] The method of embodiments 1 or 2, wherein the peptidomimetic macrocycle is (SEQ ID NO: 475)

[chemical structure]

or a pharmaceutically acceptable salt thereof.

### Embodiment 86

[0986] The method of embodiments 1 or 2, wherein the peptidomimetic macrocycle is (SEQ ID NO: 476)

[chemical structure]

or a pharmaceutically acceptable salt thereof.

### Embodiment 87

[0987] The method of embodiments 1 or 2, wherein the peptidomimetic macrocycle is (SEQ ID NO: 481)

[chemical structure]

or a pharmaceutically acceptable salt thereof.

### Embodiment 88

[0988] The method of embodiments 1 or 2, wherein the peptidomimetic macrocycle is (SEQ ID NO: 482)

[chemical structure]

or a pharmaceutically acceptable salt thereof.

### Embodiment 89

[0989] The method of embodiments 1 or 2, wherein the peptidomimetic macrocycle is (SEQ ID NO: 487)

[chemical structure]

or a pharmaceutically acceptable salt thereof.

### Embodiment 90

[0990] The method of embodiments 1 or 2, wherein the peptidomimetic macrocycle is (SEQ ID NO: 572)

[chemical structure]

or a pharmaceutically acceptable salt thereof.

### Embodiment 91

[0991] The method of embodiments 1 or 2, wherein the peptidomimetic macrocycle is (SEQ ID NO: 572)

[chemical structure]

or a pharmaceutically acceptable salt thereof.

### Embodiment 92

[0992] The method of embodiments 1 or 2, wherein the peptidomimetic macrocycle is (SEQ ID NO: 1500)

[chemical structure]

or a pharmaceutically acceptable salt thereof.

### Embodiment 94

[0993] A method of modulating the activity of p53 and/or MDM2 and/or MDMX in a subject in need thereof comprising administering to the subject a therapeutically-effective amount of a peptidomimetic macrocycle and at least one additional pharmaceutically active agent, wherein the at least one additional pharmaceutically active agent:
[0994] (a) is selected from the group consisting of cobimetinib and binimetinib, or
[0995] (b) is a cyclin dependent kinase inhibitor (CDKI) and the CDKI and the peptidomimetic macrocycle are administered with a time separation of more than about 61 minutes;

[0996] wherein the peptidomimetic macrocycle comprises an amino acid sequence which is at least about 60% identical to an amino acid sequence in any of Table 1, Table 1a, Table 1b, and Table 1c, wherein the peptidomimetic macrocycle has the formula:

[chemical structure]

[0997] or pharmaceutically acceptable salt thereof, wherein:
[0998] each A, C, D, and E is independently an amino acid;
[0999] each B is independently an amino acid,

[chemical structure]

[—NH-L₃-CO—], [—NH-L₃-SO₂—], or [—NH-L₃-];
[1000] each R₁ and R₂ is independently hydrogen, alkyl, alkenyl, alkynyl, arylalkyl, cycloalkyl, cycloalkylalkyl, heteroalkyl, or heterocycloalkyl, unsubstituted or substituted with halo-; or forms a macrocycle-forming linker L′ connected to the alpha position of one of said D or E amino acids;
[1001] each R₃ is independently hydrogen, alkyl, alkenyl, alkynyl, arylalkyl, heteroalkyl, cycloalkyl, heterocycloalkyl, cycloalkylalkyl, aryl, or heteroaryl, optionally substituted with R₅;
[1002] each L and L′ is independently a macrocycle-forming linker of the formula -L₁-L₂-;
[1003] each L₁, L₂, and L₃ is independently alkylene, alkenylene, alkynylene, heteroalkylene, cycloalkylene, heterocycloalkylene, arylene, heteroarylene, or [—R₄—K—R₄-]ₙ, each being optionally substituted with R₅;
[1004] each R₄ is independently alkylene, alkenylene, alkynylene, heteroalkylene, cycloalkylene, heterocycloalkylene, arylene, or heteroarylene;
[1005] each K is independently O, S, SO, SO₂, CO, CO₂, or CONR₃;
[1006] each R₅ is independently halogen, alkyl, —OR₆, —N(R₆)₂, —SR₆, —SOR₆, —SO₂R₆, —CO₂R₆, a fluorescent moiety, a radioisotope or a therapeutic agent;
[1007] each R₆ is independently hydrogen, alkyl, alkenyl, alkynyl, arylalkyl, cycloalkylalkyl, heterocycloalkyl, a fluorescent moiety, a radioisotope or a therapeutic agent;
[1008] each R₇ is independently hydrogen, alkyl, alkenyl, alkynyl, arylalkyl, cycloalkyl, heteroalkyl, cycloalkylalkyl, heterocycloalkyl, aryl, or heteroaryl, optionally substituted with R₅, or part of a cyclic structure with a D residue;
[1009] each R₈ is independently hydrogen, alkyl, alkenyl, alkynyl, arylalkyl, cycloalkyl, heteroalkyl, cycloalkylalkyl, heterocycloalkyl, aryl, or heteroaryl, optionally substituted with R₅, or part of a cyclic structure with an E residue;
[1010] each v is independently an integer from 1-1000;
[1011] each w is independently an integer from 1-1000;
[1012] u is an integer from 1-10;
[1013] each x, y and z is independently an integer from 0-10; and
[1014] each n is independently an integer from 1-5.

### Embodiment 95

[1015] A method of antagonizing an interaction between p53 and MDM2 proteins and/or between p53 and MDMX proteins in a subject in need thereof comprising administering to the subject a therapeutically-effective amount of a peptidomimetic macrocycle and at least one additional pharmaceutically active agent, wherein the at least one additional pharmaceutically active agent:
[1016] (a) is selected from the group consisting of cobimetinib and binimetinib, or
[1017] (b) is a cyclin dependent kinase inhibitor (CDKI) and the CDKI and the peptidomimetic macrocycle are administered with a time separation of more than about 61 minutes;

[1018] wherein the peptidomimetic macrocycle comprises an amino acid sequence which is at least about 60% identical to an amino acid sequence in any of Table 1, Table 1a, Table 1b, and Table 1c and wherein the peptidomimetic macrocycle has the formula:

[chemical structure]

[1019] or pharmaceutically acceptable salt thereof, wherein:
[1020] each A, C, D, and E is independently an amino acid;
[1021] each B is independently an amino acid,

[chemical structure]

[—NH-L₃-CO—], [—NH-L₃-SO₂—], or [—NH-L₃-];
[1022] each R₁ and R₂ is independently hydrogen, alkyl, alkenyl, alkynyl, arylalkyl, cycloalkyl, cycloalkylalkyl, heteroalkyl, or heterocycloalkyl, unsubstituted or substituted with halo-; or forms a macrocycle-forming linker L′ connected to the alpha position of one of said D or E amino acids;
[1023] each R₃ is independently hydrogen, alkyl, alkenyl, alkynyl, arylalkyl, heteroalkyl, cycloalkyl, heterocycloalkyl, cycloalkylalkyl, aryl, or heteroaryl, optionally substituted with R₅;
[1024] each L and L′ is independently a macrocycle-forming linker of the formula -L₁-L₂-;
[1025] each L₁, L₂, and L₃ is independently alkylene, alkenylene, alkynylene, heteroalkylene, cycloalkylene, heterocycloalkylene, arylene, heteroarylene, or [—R₄—K—R₄-]ₙ, each being optionally substituted with R₅;
[1026] each R₄ is independently alkylene, alkenylene, alkynylene, heteroalkylene, cycloalkylene, heterocycloalkylene, arylene, or heteroarylene;
[1027] each K is independently O, S, SO, SO₂, CO, CO₂, or CONR₃;
[1028] each R₅ is independently halogen, alkyl, —OR₆, —N(R₆)₂, —SR₆, —SOR₆, —SO₂R₆, —CO₂R₆, a fluorescent moiety, a radioisotope or a therapeutic agent;
[1029] each R₆ is independently hydrogen, alkyl, alkenyl, alkynyl, arylalkyl, cycloalkylalkyl, heterocycloalkyl, a fluorescent moiety, a radioisotope or a therapeutic agent;
[1030] each R₇ is independently hydrogen, alkyl, alkenyl, alkynyl, arylalkyl, cycloalkyl, heteroalkyl, cycloalkylalkyl, heterocycloalkyl, aryl, or heteroaryl, optionally substituted with R₅, or part of a cyclic structure with a D residue;
[1031] each R₈ is independently hydrogen, alkyl, alkenyl, alkynyl, arylalkyl, cycloalkyl, heteroalkyl, cycloalkylalkyl, heterocycloalkyl, aryl, or heteroaryl, optionally substituted with R₅, or part of a cyclic structure with an E residue;
[1032] each v is independently an integer from 1-1000;
[1033] each w is independently an integer from 1-1000;
[1034] u is an integer from 1-10;
[1035] each x, y and z is independently an integer from 0-10; and
[1036] each n is independently an integer from 1-5.

### Embodiment 96

[1037] The method of any one of embodiments 1-95, wherein the cancer is selected from the group consisting of head and neck cancer, melanoma, lung cancer, breast cancer, colon cancer, ovarian cancer, NSCLC, stomach cancer, prostate cancer, leukemia, lymphoma, mesothelioma, renal cancer, non-Hodgkin lymphoma (NHL), and glioma.

### Embodiment 97

[1038] The method of any one of embodiments 1-96, wherein, a sub-therapeutic amount of the at least one additional pharmaceutically active agent is administered.

### Embodiment 98

[1039] The method of any one of embodiments 1-97, wherein a therapeutic amount of the at least one additional pharmaceutically active agent is administered.

### Embodiment 99

[1040] The method of any one of embodiments 1-98, wherein the at least one additional pharmaceutically active agent comprises cobimetinib or binimetinib.

### Embodiment 100

[1041] The method of any one of embodiments 1-98, wherein the at least one additional pharmaceutically active agent comprises the cyclin dependent kinase inhibitor (CDKI) and the CDKI and the peptidomimetic macrocycle are administered with a time separation of more than about 61 minutes.

### Embodiment 101

[1042] The method of any one of embodiments 1-98 or 100, wherein the at least one additional pharmaceutically active agent comprises palbociclib (PD0332991); abemaciclib (LY2835219); ribociclib (LEE 011); voruciclib (P1446A-05); fascaplysin; arcyriaflavin; 2-bromo-12,13-dihydro-5H-indolo[2,3-a]pyrrolo[3,4-c]carbazole-5,7(6H)-dione; 3-amino thioacridone (3-ATA), trans-4-((6-(ethylamino)-2-((1-(phenylmethyl)-1H-indol-5-yl)amino)-4-pyrimidinyl)amino)-cyclohexano (CINK4); 1,4-dimethoxyacridine-9(10H)-thione (NSC 625987); 2-methyl-5-(p-tolylamino)benzo[d]thiazole-4,7-dione (ryuvidine); and flavopiridol (alvocidib); seliciclib; dinaciclib; milciclib; roniciclib; atuveciclib; briciclib; riviciclib; trilaciclib; and any combination thereof.

### Embodiment 102

[1043] The method of embodiment 100 or 101, wherein the peptidomimetic macrocycle is administered at least 1 hour, 2 hours, 3 hours, 4 hours, 5 hours, 6 hours, 7 hours, 8 hours, 9 hours, 10 hours, 11 hours, 12 hours, 1 day, 2 days, 3 days, 4 days, 5 days, 6 days, 7 days, 8 days, 9, days, 10 days, 11 days, 12 days, 13 days, 14 days, 15 days, 16 days, 17 days, 18 days, 19 days, 20 days, 21 days, 22 days, 23 days, 24 days, 25 days, 26 days, 27 days, 28 days, 29 days, 1 week, 2 weeks, three weeks, 4 weeks, 1 month, 2 months, 3 months, 4 months, 5 months, 6 months, 7 months, 8 months, 9 months, 10 months, 11 months, 12 months, or any combination thereof, before the cyclin dependent kinase inhibitor is administered.

### Embodiment 103

[1044] The method of embodiment 100 or 101, wherein the peptidomimetic macrocycle is administered at most 1 hour, 2 hours, 3 hours, 4 hours, 5 hours, 6 hours, 7 hours, 8 hours, 9 hours, 10 hours, 11 hours, 12 hours, 1 day, 2 days, 3 days, 4 days, 5 days, 6 days, 7 days, 8 days, 9, days, 10 days, 11 days, 12 days, 13 days, 14 days, 15 days, 16 days, 17 days, 18 days, 19 days, 20 days, 21 days, 22 days, 23 days, 24 days, 25 days, 26 days, 27 days, 28 days, 29 days, 1 week, 2 weeks, three weeks, 4 weeks, 1 month, 2 months, 3 months, 4 months, 5 months, 6 months, 7 months, 8 months, 9 months, 10 months, 11 months, 12 months, or any combination thereof, before the cyclin dependent kinase inhibitor is administered.

### Embodiment 104

[1045] The method of embodiment 100 or 101, wherein the peptidomimetic macrocycle is administered about 1 hour, 2 hours, 3 hours, 4 hours, 5 hours, 6 hours, 7 hours, 8 hours, 9 hours, 10 hours, 11 hours, 12 hours, 1 day, 2 days, 3 days, 4 days, 5 days, 6 days, 7 days, 8 days, 9, days, 10 days, 11 days, 12 days, 13 days, 14 days, 15 days, 16 days, 17 days, 18 days, 19 days, 20 days, 21 days, 22 days, 23 days, 24 days, 25 days, 26 days, 27 days, 28 days, 29 days, 1 week, 2 weeks, three weeks, 4 weeks, 1 month, 2 months, 3 months, 4 months, 5 months, 6 months, 7 months, 8 months, 9 months, 10 months, 11 months, 12 months, or any combination thereof, before the cyclin dependent kinase inhibitor is administered.

### Embodiment 105

[1046] The method of embodiment 100 or 101, wherein the peptidomimetic macrocycle is administered at least 1 hour, 2 hours, 3 hours, 4 hours, 5 hours, 6 hours, 7 hours, 8 hours, 9 hours, 10 hours, 11 hours, 12 hours, 1 day, 2 days, 3 days, 4 days, 5 days, 6 days, 7 days, 8 days, 9, days, 10 days, 11 days, 12 days, 13 days, 14 days, 15 days, 16 days, 17 days, 18 days, 19 days, 20 days, 21 days, 22 days, 23 days, 24 days, 25 days, 26 days, 27 days, 28 days, 29 days, 1 week, 2 weeks, three weeks, 4 weeks, 1 month, 2 months, 3 months, 4 months, 5 months, 6 months, 7 months, 8 months, 9 months, 10 months, 11 months, 12 months, or any combination thereof, after the cyclin dependent kinase inhibitor is administered.

### Embodiment 106

[1047] The method of embodiment 100 or 101, wherein the peptidomimetic macrocycle is administered at most 1 hour, 2 hours, 3 hours, 4 hours, 5 hours, 6 hours, 7 hours, 8 hours, 9 hours, 10 hours, 11 hours, 12 hours, 1 day, 2 days, 3 days, 4 days, 5 days, 6 days, 7 days, 8 days, 9, days, 10 days, 11 days, 12 days, 13 days, 14 days, 15 days, 16 days, 17 days, 18 days, 19 days, 20 days, 21 days, 22 days, 23 days, 24 days, 25 days, 26 days, 27 days, 28 days, 29 days, 1 week, 2 weeks, three weeks, 4 weeks, 1 month, 2 months, 3 months, 4 months, 5 months, 6 months, 7 months, 8 months, 9 months, 10 months, 11 months, 12 months, or any combination thereof, after the cyclin dependent kinase inhibitor is administered.

### Embodiment 107

[1048] The method of embodiment 100 or 101, wherein the peptidomimetic macrocycle is administered about 1 hour, 2 hours, 3 hours, 4 hours, 5 hours, 6 hours, 7 hours, 8 hours, 9 hours, 10 hours, 11 hours, 12 hours, 1 day, 2 days, 3 days, 4 days, 5 days, 6 days, 7 days, 8 days, 9, days, 10 days, 11 days, 12 days, 13 days, 14 days, 15 days, 16 days, 17 days, 18 days, 19 days, 20 days, 21 days, 22 days, 23 days, 24 days, 25 days, 26 days, 27 days, 28 days, 29 days, 1 week, 2 weeks, three weeks, 4 weeks, 1 month, 2 months, 3 months, 4 months, 5 months, 6 months, 7 months, 8 months, 9 months, 10 months, 11 months, 12 months, or any combination thereof, after the cyclin dependent kinase inhibitor is administered.

### Embodiment 108

[1049] The method of any one of embodiments 1-107, wherein an additional therapeutic agent is administered.

### Embodiment 109

[1050] The method of any one of embodiments 1-108, wherein the subject comprises cancer cells that overexpress PD-L1.

### Embodiment 110

[1051] The method of any one of embodiments 1-109, wherein the subject comprises cancer cells that overexpress PD-1.

### Embodiment 111

[1052] The method of any one of embodiments 1-110, wherein the subject comprises cancer cells that overexpress miR-34.

### Embodiment 112

[1053] The method of any one of embodiments 108-111, wherein the additional therapeutic agent is a PD-1 antagonist.

### Embodiment 113

[1054] The method of any one of embodiments 108-112, wherein the additional therapeutic agent is a PD-L1 antagonist.

### Embodiment 114

[1055] The method of any one of embodiments 108-113, wherein the additional therapeutic agent is an agent that blocks the binding of PD-L1 to PD-1.

### Embodiment 115

[1056] The method of any one of embodiments 108-114, wherein the additional therapeutic agent specifically binds to PD-1.

### Embodiment 116

[1057] The method of any one of embodiments 108-115, wherein the additional therapeutic agent specifically binds to PD-L1.

### Embodiment 117

[1058] The method of any one of embodiments 1-116, wherein PD-L1 expression is downregulated.

### Embodiment 118

[1059] The method of any one of embodiments 1-117, wherein PD-1 expression is downregulated.

### Embodiment 119

[1060] The method of any one of embodiments 1-118, wherein S-phase is inhibited.

### Embodiment 120

[1061] The method of any one of embodiments 1-119, wherein M-phase is inhibited.

### Embodiment 121

[1062] The method of any one of embodiments 1-120, wherein the peptidomimetic macrocycle antagonizes an interaction between p53 and MDM2 proteins.

### Embodiment 122

[1063] The method of any one of embodiments 1-121, wherein the peptidomimetic macrocycle antagonizes an interaction between p53 and MDMX proteins.

### Embodiment 123

[1064] The method of any one of embodiments 1-122, wherein the peptidomimetic macrocycle antagonizes an interaction between p53 and MDM2 proteins and p53 and MDMX proteins.

### Embodiment 124

[1065] The method of any one of embodiments 1-123, wherein the peptidomimetic macrocycle antagonizes an interaction between p53 and MDM2 proteins and p53 and MDMX proteins.

### Embodiment 201

[1066] A method of treating a condition in a subject in need thereof, the method comprising administering to the subject a therapeutically-effective amount of a peptidomimetic macrocycle and at least one pharmaceutically-active agent, wherein the peptidomimetic macrocycle and the at least one pharmaceutically-active agent are administered with a time separation of more than 61 minutes.

### Embodiment 202

[1067] The method of embodiment 201, wherein the peptidomimetic macrocycle is of the formula:

[chemical structure]

[1068] or pharmaceutically acceptable salt thereof, wherein:
[1069] each A, C, D, and E is independently an amino acid;
[1070] each B is independently an amino acid,

[chemical structure]

[—NH-L₃-CO—], [—NH-L₃-SO₂—], or [—NH-L₃-];
[1071] each R₁ and R₂ is independently hydrogen, alkyl, alkenyl, alkynyl, arylalkyl, cycloalkyl, cycloalkylalkyl, heteroalkyl, or heterocycloalkyl, unsubstituted or substituted with halo-; or forms a macrocycle-forming linker L′ connected to the alpha position of one of said D or E amino acids;
[1072] each R₃ is independently hydrogen, alkyl, alkenyl, alkynyl, arylalkyl, heteroalkyl, cycloalkyl, heterocycloalkyl, cycloalkylalkyl, aryl, or heteroaryl, optionally substituted with R₅;
[1073] each L and L′ is independently a macrocycle-forming linker of the formula -L₁-L₂-;
[1074] each L₁, L₂, and L₃ is independently alkylene, alkenylene, alkynylene, heteroalkylene, cycloalkylene, heterocycloalkylene, arylene, heteroarylene, or [—R₄—K—R₄-]ₙ, each being optionally substituted with R₅;
[1075] each R₄ is independently alkylene, alkenylene, alkynylene, heteroalkylene, cycloalkylene, heterocycloalkylene, arylene, or heteroarylene;
[1076] each K is independently O, S, SO, SO₂, CO, CO₂, or CONR₃;
[1077] each R₅ is independently halogen, alkyl, —OR₆, —N(R₆)₂, —SR₆, —SOR₆, —SO₂R₆, —CO₂R₆, a fluorescent moiety, a radioisotope or a therapeutic agent;
[1078] each R₆ is independently hydrogen, alkyl, alkenyl, alkynyl, arylalkyl, cycloalkylalkyl, heterocycloalkyl, a fluorescent moiety, a radioisotope or a therapeutic agent;
[1079] each R₇ is independently hydrogen, alkyl, alkenyl, alkynyl, arylalkyl, cycloalkyl, heteroalkyl, cycloalkylalkyl, heterocycloalkyl, aryl, or heteroaryl, optionally substituted with R₅, or part of a cyclic structure with a D residue;
[1080] each R₈ is independently hydrogen, alkyl, alkenyl, alkynyl, arylalkyl, cycloalkyl, heteroalkyl, cycloalkylalkyl, heterocycloalkyl, aryl, or heteroaryl, optionally substituted with R₅, or part of a cyclic structure with an E residue;
[1081] each v is independently an integer from 1-1000;
[1082] each w is independently an integer from 1-1000;
[1083] u is 1, 2, 3, 4, 5, 6, 7, 8, 9, or 10;
[1084] each x, y and z is independently 1, 2, 3, 4, 5, 6, 7, 8, 9, or 10; and
[1085] each n is independently 1, 2, 3, 4, or 5.

### Embodiment 203

[1086] The method of embodiment 202, wherein v is 3-10.

### Embodiment 204

[1087] The method of embodiments 202 or 203, wherein v is 3.

### Embodiment 205

[1088] The method of any one of embodiments 202-204, wherein w is 3-10.

### Embodiment 206

[1089] The method of any one of embodiments 202-205, wherein w is 6.

### Embodiment 207

[1090] The method of any one of embodiments 202-206, wherein x+y+z=6.

### Embodiment 208

[1091] The method of any one of embodiments 202-207, wherein each L₁ and L₂ is independently alkylene, alkenylene, alkynylene, heteroalkylene, cycloalkylene, heterocycloalkylene, arylene, or heteroarylene.

### Embodiment 209

[1092] The method of any one of embodiments 202-208, wherein each L₁ and L₂ is independently alkylene or alkenylene.

### Embodiment 210

[1093] The method of any one of embodiments 202-209, wherein each R₁ and R₂ is independently hydrogen, alkyl, alkenyl, alkynyl, arylalkyl, cycloalkyl, cycloalkylalkyl, heteroalkyl, or heterocycloalkyl, unsubstituted or substituted with halo-.

### Embodiment 211

[1094] The method of any one of embodiments 202-210, wherein each R₁ and R₂ is independently hydrogen.

### Embodiment 212

[1095] The method of any one of embodiments 202-210, wherein each R₁ and R₂ is independently alkyl.

### Embodiment 213

[1096] The method of any one of embodiments 202-210 or 212, wherein each R₁ and R₂ is independently methyl.

### Embodiment 214

[1097] The method of any one of embodiments 202-214, wherein u is 1.

### Embodiment 215

[1098] The method of any one of embodiments 202-214, wherein each E is Ser or Ala, or an analogue thereof.

### Embodiment 216

[1099] The method of any one of embodiments 201-215, wherein the peptidomimetic macrocycle comprises an amino acid sequence that is at least 60% identical to an amino acid sequence listed in Table 1, Table 1a, Table 1b, Table 1c, Table 2a, or Table 2b.

### Embodiment 217

[1100] The method of any one of embodiments 201-216, wherein the peptidomimetic macrocycle comprises an amino acid sequence that is at least 70% identical to an amino acid sequence listed in Table 1, Table 1a, Table 1b, Table 1c, Table 2a, or Table 2b.

### Embodiment 218

[1101] The method of any one of embodiments 201-217, wherein the peptidomimetic macrocycle comprises an amino acid sequence that is at least 80% identical to an amino acid sequence listed in Table 1, Table 1a, Table 1b, Table 1c, Table 2a, or Table 2b.

### Embodiment 219

[1102] The method of any one of embodiments 201-218, wherein the peptidomimetic macrocycle is at least 60% identical to SP-153, SP-303, SP-331, or SP-671.

### Embodiment 220

[1103] The method of any one of embodiments 201-219, wherein the condition is cancer.

### Embodiment 221

[1104] The method of any one of embodiments 201-220, wherein the cancer is lymphoma.

### Embodiment 222

[1105] The method of any one of embodiments 201-220, wherein the cancer is breast cancer.

### Embodiment 223

[1106] The method of any one of embodiments 201-220, wherein the cancer is skin cancer.

### Embodiment 224

[1107] The method of any one of embodiments 201-220, wherein the cancer is leukemia.

### Embodiment 225

[1108] The method of any one of embodiments 201-220, wherein the cancer is melanoma.

### Embodiment 226

[1109] The method of any one of embodiments 201-220, wherein the cancer is bone cancer

### Embodiment 227

[1110] The method of any one of embodiments 201-226, wherein the at least one pharmaceutically-active agent, pharmaceutically-acceptable salt, or conjugate thereof is a cyclin-dependent kinase (CDK) inhibitor.

### Embodiment 228

[1111] The method of any one of embodiments 201-227, wherein the CDK inhibitor is palbociclib.

### Embodiment 229

[1112] The method of any one of embodiments 201-227, wherein the CDK inhibitor is abemaciclib.

### Embodiment 230

[1113] The method of any one of embodiments 201-227, wherein the CDK inhibitor is ribociclib.

### Embodiment 231

[1114] The method of any one of embodiments 201-226, wherein the at least one pharmaceutically-active agent is a mitogen-activated protein kinase (MEK) inhibitor.

### Embodiment 232

[1115] The method of any one of embodiments 201-226, wherein the at least one pharmaceutically-active agent is a microtubule inhibitor.

### Embodiment 233

[1116] The method of any one of embodiments 201-226 or 232, wherein the microtubule inhibitor is eribulin.

### Embodiment 234

[1117] The method of any one of embodiments 201-226 or 232, wherein the microtubule inhibitor is paclitaxel.

### Embodiment 235

[1118] The method of any one of embodiments 201-226, 232, or 234, wherein the microtubule inhibitor is nanoparticle albumin-bound paclitaxel.

The application's sequence listing, which the Patent Office published only in electronic form, follows.

SEQUENCE LISTING (1500 sequences)

SEQ ID NO: 1-7 - skipped (7 entries)

SEQ ID NO: 8 - protein, 10 aa, Artificial Sequence
  Description of Artificial Sequence: Synthetic peptide
  MOD_RES (2)..(2): Any amino acid
  MOD_RES (9)..(9): Any amino acid
  see specification as filed for detailed description of substitutions and preferred embodiments
FXHYWAQLXS

SEQ ID NO: 9 - protein, 10 aa, Artificial Sequence
  Description of Artificial Sequence: Synthetic peptide
  MOD_RES (2)..(2): Any amino acid
  MOD_RES (8)..(8): Leu or Cba
  MOD_RES (9)..(9): Any amino acid
  see specification as filed for detailed description of substitutions and preferred embodiments
FXEYWAQXXA

SEQ ID NO: 10 - protein, 12 aa, Artificial Sequence
  Description of Artificial Sequence: Synthetic peptide
  N-term Ac
  MOD_RES (2)..(2): Alpha-Me R8-octenyl-alanine olefin amino acid connected by an all-carbon crosslinker comprising one double bond
  misc_feature (2)..(9): Crosslink between residues
  MOD_RES (7)..(7): Ac3c
  MOD_RES (9)..(9): Alpha-Me S5-pentenyl-alanine olefin amino acid connected by an all-carbon crosslinker comprising one double bond
  C-term NH2
FAAYWEXLAAAA

SEQ ID NO: 11 - protein, 12 aa, Artificial Sequence
  Description of Artificial Sequence: Synthetic peptide
  N-term Ac
  MOD_RES (2)..(2): Alpha-Me R8-octenyl-alanine olefin amino acid connected by an all-carbon crosslinker comprising one double bond
  misc_feature (2)..(9): Crosslink between residues
  MOD_RES (7)..(7): Ac3c
  MOD_RES (9)..(9): Alpha-Me S5-pentenyl-alanine olefin amino acid connected by an all-carbon crosslinker comprising one double bond
  MOD_RES (11)..(11): 2-aminoisobutyric acid
  C-term NH2
FAAYWEXLAAXA

SEQ ID NO: 12 - protein, 14 aa, Artificial Sequence
  Description of Artificial Sequence: Synthetic peptide
  N-term Ac
  MOD_RES (4)..(4): Alpha-Me R8-octenyl-alanine olefin amino acid connected by an all-carbon crosslinker comprising one double bond
  misc_feature (4)..(11): Crosslink between residues
  MOD_RES (11)..(11): Alpha-Me S5-pentenyl-alanine olefin amino acid connected by an all-carbon crosslinker comprising one double bond
  MOD_RES (14)..(14): Norleucine
  C-term NH2
LTFAAYWAQLASAL

SEQ ID NO: 13 - protein, 14 aa, Artificial Sequence
  Description of Artificial Sequence: Synthetic peptide
  N-term Ac
  MOD_RES (4)..(4): Alpha-Me R8-octenyl-alanine olefin amino acid connected by an all-carbon crosslinker comprising one double bond
  misc_feature (4)..(11): Crosslink between residues
  MOD_RES (11)..(11): Alpha-Me S5-pentenyl-alanine olefin amino acid connected by an all-carbon crosslinker comprising one double bond
  C-term NH2
LTFAAYWAQLASAL

SEQ ID NO: 14 - protein, 14 aa, Artificial Sequence
  Description of Artificial Sequence: Synthetic peptide
  N-term Ac
  MOD_RES (4)..(4): Alpha-Me R8-octenyl-alanine olefin amino acid connected by an all-carbon crosslinker comprising one double bond
  misc_feature (4)..(11): Crosslink between residues
  MOD_RES (11)..(11): Alpha-Me S5-pentenyl-alanine olefin amino acid connected by an all-carbon crosslinker comprising one double bond
  C-term NH2
LTFAAYWAQLASAM

SEQ ID NO: 15 - protein, 14 aa, Artificial Sequence
  Description of Artificial Sequence: Synthetic peptide
  N-term Ac
  MOD_RES (4)..(4): Alpha-Me R8-octenyl-alanine olefin amino acid connected by an all-carbon crosslinker comprising one double bond
  misc_feature (4)..(11): Crosslink between residues
  MOD_RES (11)..(11): Alpha-Me S5-pentenyl-alanine olefin amino acid connected by an all-carbon crosslinker comprising one double bond
  MOD_RES (14)..(14): hLeu
  C-term NH2
LTFAAYWAQLASAL

SEQ ID NO: 16 - protein, 14 aa, Artificial Sequence
  Description of Artificial Sequence: Synthetic peptide
  N-term Ac
  MOD_RES (4)..(4): Alpha-Me R8-octenyl-alanine olefin amino acid connected by an all-carbon crosslinker comprising one double bond
  misc_feature (4)..(11): Crosslink between residues
  MOD_RES (11)..(11): Alpha-Me S5-pentenyl-alanine olefin amino acid connected by an all-carbon crosslinker comprising one double bond
  C-term NH2
LTFAAYWAQLASAF

SEQ ID NO: 17 - protein, 14 aa, Artificial Sequence
  Description of Artificial Sequence: Synthetic peptide
  N-term Ac
  MOD_RES (4)..(4): Alpha-Me R8-octenyl-alanine olefin amino acid connected by an all-carbon crosslinker comprising one double bond
  misc_feature (4)..(11): Crosslink between residues
  MOD_RES (11)..(11): Alpha-Me S5-pentenyl-alanine olefin amino acid connected by an all-carbon crosslinker comprising one double bond
  C-term NH2
LTFAAYWAQLASAI

SEQ ID NO: 18 - protein, 14 aa, Artificial Sequence
  Description of Artificial Sequence: Synthetic peptide
  N-term Ac
  MOD_RES (4)..(4): Alpha-Me R8-octenyl-alanine olefin amino acid connected by an all-carbon crosslinker comprising one double bond
  misc_feature (4)..(11): Crosslink between residues
  MOD_RES (11)..(11): Alpha-Me S5-pentenyl-alanine olefin amino acid connected by an all-carbon crosslinker comprising one double bond
  MOD_RES (14)..(14): Cyclohexyl-Gly
  C-term NH2
LTFAAYWAQLASAG

SEQ ID NO: 19 - protein, 14 aa, Artificial Sequence
  Description of Artificial Sequence: Synthetic peptide
  N-term Ac
  MOD_RES (4)..(4): Alpha-Me R8-octenyl-alanine olefin amino acid connected by an all-carbon crosslinker comprising one double bond
  misc_feature (4)..(11): Crosslink between residues
  MOD_RES (11)..(11): Alpha-Me S5-pentenyl-alanine olefin amino acid connected by an all-carbon crosslinker comprising one double bond
  MOD_RES (14)..(14): 2-aminoisobutyric acid
  C-term NH2
LTFAAYWAQLASAX

SEQ ID NO: 20 - protein, 14 aa, Artificial Sequence
  Description of Artificial Sequence: Synthetic peptide
  N-term Ac
  MOD_RES (4)..(4): Alpha-Me R8-octenyl-alanine olefin amino acid connected by an all-carbon crosslinker comprising one double bond
  misc_feature (4)..(11): Crosslink between residues
  MOD_RES (11)..(11): Alpha-Me S5-pentenyl-alanine olefin amino acid connected by an all-carbon crosslinker comprising one double bond
  C-term NH2
LTFAAYWAQLASAA

SEQ ID NO: 21 - protein, 14 aa, Artificial Sequence
  Description of Artificial Sequence: Synthetic peptide
  N-term Ac
  MOD_RES (4)..(4): Alpha-Me R8-octenyl-alanine olefin amino acid connected by an all-carbon crosslinker comprising one double bond
  misc_feature (4)..(9): Crosslink between residues
  MOD_RES (9)..(9): Alpha-Me S5-pentenyl-alanine olefin amino acid connected by an all-carbon crosslinker comprising one double bond
  MOD_RES (11)..(11): Alpha-Me S5-pentenyl-alanine olefin amino acid connected by an all-carbon crosslinker comprising one double bond
  misc_feature (11)..(13): Crosslink between residues
  MOD_RES (13)..(13): Alpha-Me S5-pentenyl-alanine olefin amino acid connected by an all-carbon crosslinker comprising one double bond
  MOD_RES (14)..(14): Norleucine
  C-term NH2
LTFAAYWAALASAL

SEQ ID NO: 22 - protein, 14 aa, Artificial Sequence
  Description of Artificial Sequence: Synthetic peptide
  N-term Ac
  MOD_RES (4)..(4): Alpha-Me R8-octenyl-alanine olefin amino acid connected by an all-carbon crosslinker comprising one double bond
  misc_feature (4)..(9): Crosslink between residues
  MOD_RES (9)..(9): Alpha-Me S5-pentenyl-alanine olefin amino acid connected by an all-carbon crosslinker comprising one double bond
  MOD_RES (11)..(11): Alpha-Me S5-pentenyl-alanine olefin amino acid connected by an all-carbon crosslinker comprising one double bond
  misc_feature (11)..(13): Crosslink between residues
  MOD_RES (13)..(13): Alpha-Me S5-pentenyl-alanine olefin amino acid connected by an all-carbon crosslinker comprising one double bond
  C-term NH2
LTFAAYWAALASAA

SEQ ID NO: 23 - protein, 12 aa, Artificial Sequence
  Description of Artificial Sequence: Synthetic peptide
  N-term Ac
  MOD_RES (2)..(2): Alpha-Me R8-octenyl-alanine olefin amino acid connected by an all-carbon crosslinker comprising one double bond
  misc_feature (2)..(9): Crosslink between residues
  MOD_RES (7)..(7): Ac3c
  MOD_RES (9)..(9): Alpha-Me S5-pentenyl-alanine olefin amino acid connected by an all-carbon crosslinker comprising one double bond
  MOD_RES (12)..(12): Norleucine
  C-term NH2
FAAYWEXLAAAL

SEQ ID NO: 24 - protein, 12 aa, Artificial Sequence
  Description of Artificial Sequence: Synthetic peptide
  N-term Ac
  MOD_RES (2)..(2): Alpha-Me R8-octenyl-alanine olefin amino acid connected by an all-carbon crosslinker comprising one double bond
  misc_feature (2)..(9): Crosslink between residues
  MOD_RES (7)..(7): Ac3c
  MOD_RES (9)..(9): Alpha-Me S5-pentenyl-alanine olefin amino acid connected by an all-carbon crosslinker comprising one double bond
  C-term NH2
FAAYWEXLAAAL

SEQ ID NO: 25 - protein, 12 aa, Artificial Sequence
  Description of Artificial Sequence: Synthetic peptide
  N-term Ac
  MOD_RES (2)..(2): Alpha-Me R8-octenyl-alanine olefin amino acid connected by an all-carbon crosslinker comprising one double bond
  misc_feature (2)..(9): Crosslink between residues
  MOD_RES (7)..(7): Ac3c
  MOD_RES (9)..(9): Alpha-Me S5-pentenyl-alanine olefin amino acid connected by an all-carbon crosslinker comprising one double bond
  C-term NH2
FAAYWEXLAAAM

SEQ ID NO: 26 - protein, 12 aa, Artificial Sequence
  Description of Artificial Sequence: Synthetic peptide
  N-term Ac
  MOD_RES (2)..(2): Alpha-Me R8-octenyl-alanine olefin amino acid connected by an all-carbon crosslinker comprising one double bond
  misc_feature (2)..(9): Crosslink between residues
  MOD_RES (7)..(7): Ac3c
  MOD_RES (9)..(9): Alpha-Me S5-pentenyl-alanine olefin amino acid connected by an all-carbon crosslinker comprising one double bond
  MOD_RES (12)..(12): hLeu
  C-term NH2
FAAYWEXLAAAL

SEQ ID NO: 27 - protein, 12 aa, Artificial Sequence
  Description of Artificial Sequence: Synthetic peptide
  N-term Ac
  MOD_RES (2)..(2): Alpha-Me R8-octenyl-alanine olefin amino acid connected by an all-carbon crosslinker comprising one double bond
  misc_feature (2)..(9): Crosslink between residues
  MOD_RES (7)..(7): Ac3c
  MOD_RES (9)..(9): Alpha-Me S5-pentenyl-alanine olefin amino acid connected by an all-carbon crosslinker comprising one double bond
  C-term NH2
FAAYWEXLAAAF

SEQ ID NO: 28 - protein, 12 aa, Artificial Sequence
  Description of Artificial Sequence: Synthetic peptide
  N-term Ac
  MOD_RES (2)..(2): Alpha-Me R8-octenyl-alanine olefin amino acid connected by an all-carbon crosslinker comprising one double bond
  misc_feature (2)..(9): Crosslink between residues
  MOD_RES (7)..(7): Ac3c
  MOD_RES (9)..(9): Alpha-Me S5-pentenyl-alanine olefin amino acid connected by an all-carbon crosslinker comprising one double bond
  C-term NH2
FAAYWEXLAAAI

SEQ ID NO: 29 - protein, 12 aa, Artificial Sequence
  Description of Artificial Sequence: Synthetic peptide
  N-term Ac
  MOD_RES (2)..(2): Alpha-Me R8-octenyl-alanine olefin amino acid connected by an all-carbon crosslinker comprising one double bond
  misc_feature (2)..(9): Crosslink between residues
  MOD_RES (7)..(7): Ac3c
  MOD_RES (9)..(9): Alpha-Me S5-pentenyl-alanine olefin amino acid connected by an all-carbon crosslinker comprising one double bond
  MOD_RES (12)..(12): Cyclohexyl-Gly
  C-term NH2
FAAYWEXLAAAG

SEQ ID NO: 30 - protein, 12 aa, Artificial Sequence
  Description of Artificial Sequence: Synthetic peptide
  N-term Ac
  MOD_RES (2)..(2): Alpha-Me R8-octenyl-alanine olefin amino acid connected by an all-carbon crosslinker comprising one double bond
  misc_feature (2)..(9): Crosslink between residues
  MOD_RES (7)..(7): Ac3c
  MOD_RES (9)..(9): Alpha-Me S5-pentenyl-alanine olefin amino acid connected by an all-carbon crosslinker comprising one double bond
  MOD_RES (12)..(12): Cyclohexyl-Ala
  C-term NH2
FAAYWEXLAAAA

SEQ ID NO: 31 - protein, 12 aa, Artificial Sequence
  Description of Artificial Sequence: Synthetic peptide
  N-term Ac
  MOD_RES (2)..(2): Alpha-Me R8-octenyl-alanine olefin amino acid connected by an all-carbon crosslinker comprising one double bond
  misc_feature (2)..(9): Crosslink between residues
  MOD_RES (7)..(7): Ac3c
  MOD_RES (9)..(9): Alpha-Me S5-pentenyl-alanine olefin amino acid connected by an all-carbon crosslinker comprising one double bond
  MOD_RES (12)..(12): 2-aminoisobutyric acid
  C-term NH2
FAAYWEXLAAAX

SEQ ID NO: 32 - protein, 15 aa, Artificial Sequence
  Description of Artificial Sequence: Synthetic peptide
  N-term Ac
  MOD_RES (4)..(4): Alpha-Me R8-octenyl-alanine olefin amino acid connected by an all-carbon crosslinker comprising one double bond
  misc_feature (4)..(11): Crosslink between residues
  MOD_RES (11)..(11): Alpha-Me S5-pentenyl-alanine olefin amino acid connected by an all-carbon crosslinker comprising one double bond
  MOD_RES (14)..(14): 2-aminoisobutyric acid
  C-term NH2
LTFAAYWAQLAAAXV

SEQ ID NO: 33 - protein, 15 aa, Artificial Sequence
  Description of Artificial Sequence: Synthetic peptide
  N-term Ac
  MOD_RES (4)..(4): Alpha-Me R8-octenyl-alanine olefin amino acid connected by an all-carbon crosslinker comprising one double bond
  misc_feature (4)..(11): Crosslink between residues
  MOD_RES (11)..(11): Alpha-Me S5-pentenyl-alanine olefin amino acid connected by an all-carbon crosslinker comprising one double bond
  MOD_RES (14)..(14): 2-aminoisobutyric acid
  C-term NH2
LTFAAYWAQLAAAXV

SEQ ID NO: 34 - protein, 15 aa, Artificial Sequence
  Description of Artificial Sequence: Synthetic peptide
  N-term Ac
  MOD_RES (4)..(4): Alpha-Me R8-octenyl-alanine olefin amino acid connected by an all-carbon crosslinker comprising one double bond
  misc_feature (4)..(11): Crosslink between residues
  MOD_RES (11)..(11): Alpha-Me S5-pentenyl-alanine olefin amino acid connected by an all-carbon crosslinker comprising one double bond
  MOD_RES (13)..(13): 2-aminoisobutyric acid
  C-term NH2
LTFAAYWAQLASXAA

SEQ ID NO: 35 - protein, 15 aa, Artificial Sequence
  Description of Artificial Sequence: Synthetic peptide
  N-term Ac
  MOD_RES (4)..(4): Alpha-Me R8-octenyl-alanine olefin amino acid connected by an all-carbon crosslinker comprising one double bond
  misc_feature (4)..(11): Crosslink between residues
  MOD_RES (11)..(11): Alpha-Me S5-pentenyl-alanine olefin amino acid connected by an all-carbon crosslinker comprising one double bond
  MOD_RES (13)..(13): 2-aminoisobutyric acid
  C-term NH2
LTFAAYWAQLASXAA

SEQ ID NO: 36 - protein, 16 aa, Artificial Sequence
  Description of Artificial Sequence: Synthetic peptide
  N-term Ac
  MOD_RES (5)..(5): Alpha-Me R8-octenyl-alanine olefin amino acid connected by an all-carbon crosslinker comprising one double bond
  misc_feature (5)..(12): Crosslink between residues
  MOD_RES (12)..(12): Alpha-Me S5-pentenyl-alanine olefin amino acid connected by an all-carbon crosslinker comprising one double bond
  MOD_RES (15)..(16): Norleucine
  C-term NH2
HLTFAHHWHQLAAALL

SEQ ID NO: 37 - protein, 16 aa, Artificial Sequence
  Description of Artificial Sequence: Synthetic peptide
  N-term Ac
  MOD_RES (5)..(5): Alpha-Me R8-octenyl-alanine olefin amino acid connected by an all-carbon crosslinker comprising one double bond
  misc_feature (5)..(12): Crosslink between residues
  MOD_RES (12)..(12): Alpha-Me S5-pentenyl-alanine olefin amino acid connected by an all-carbon crosslinker comprising one double bond
  C-term NH2
DLTFAHHWHQLARRLV

SEQ ID NO: 38 - protein, 16 aa, Artificial Sequence
  Description of Artificial Sequence: Synthetic peptide
  N-term Ac
  MOD_RES (5)..(5): Alpha-Me R8-octenyl-alanine olefin amino acid connected by an all-carbon crosslinker comprising one double bond
  misc_feature (5)..(12): Crosslink between residues
  MOD_RES (12)..(12): Alpha-Me S5-pentenyl-alanine olefin amino acid connected by an all-carbon crosslinker comprising one double bond
  C-term NH2
HHTFAHHWHQLAAAML

SEQ ID NO: 39 - protein, 13 aa, Artificial Sequence
  Description of Artificial Sequence: Synthetic peptide
  N-term Ac
  MOD_RES (2)..(2): Alpha-Me R8-octenyl-alanine olefin amino acid connected by an all-carbon crosslinker comprising one double bond
  misc_feature (2)..(9): Crosslink between residues
  MOD_RES (9)..(9): Alpha-Me S5-pentenyl-alanine olefin amino acid connected by an all-carbon crosslinker comprising one double bond
  MOD_RES (13)..(13): Cyclohexyl-Ala
  C-term NH2
FAHHWHQLARRDA

SEQ ID NO: 40 - protein, 13 aa, Artificial Sequence
  Description of Artificial Sequence: Synthetic peptide
  N-term Ac
  MOD_RES (2)..(2): Alpha-Me R8-octenyl-alanine olefin amino acid connected by an all-carbon crosslinker comprising one double bond
  misc_feature (2)..(9): Crosslink between residues
  MOD_RES (9)..(9): Alpha-Me S5-pentenyl-alanine olefin amino acid connected by an all-carbon crosslinker comprising one double bond
  C-term NH2
FAHHWHQLAHRFV

SEQ ID NO: 41 - protein, 16 aa, Artificial Sequence
  Description of Artificial Sequence: Synthetic peptide
  N-term Ac
  MOD_RES (5)..(5): Alpha-Me R8-octenyl-alanine olefin amino acid connected by an all-carbon crosslinker comprising one double bond
  misc_feature (5)..(12): Crosslink between residues
  MOD_RES (12)..(12): Alpha-Me S5-pentenyl-alanine olefin amino acid connected by an all-carbon crosslinker comprising one double bond
  MOD_RES (15)..(15): hLeu
  C-term NH2
HLTFAHHWHQLAAALA

SEQ ID NO: 42 - protein, 16 aa, Artificial Sequence
  Description of Artificial Sequence: Synthetic peptide
  N-term Ac
  MOD_RES (5)..(5): Alpha-Me R8-octenyl-alanine olefin amino acid connected by an all-carbon crosslinker comprising one double bond
  misc_feature (5)..(12): Crosslink between residues
  MOD_RES (12)..(12): Alpha-Me S5-pentenyl-alanine olefin amino acid connected by an all-carbon crosslinker comprising one double bond
  MOD_RES (15)..(15): Cyclohexyl-Gly
  MOD_RES (16)..(16): D-amino acid
  C-term NH2
DLTFAHHWHQLARRGL

SEQ ID NO: 43 - protein, 16 aa, Artificial Sequence
  Description of Artificial Sequence: Synthetic peptide
  N-term Ac
  MOD_RES (5)..(5): Alpha-Me R8-octenyl-alanine olefin amino acid connected by an all-carbon crosslinker comprising one double bond
  misc_feature (5)..(12): Crosslink between residues
  MOD_RES (12)..(12): Alpha-Me S5-pentenyl-alanine olefin amino acid connected by an all-carbon crosslinker comprising one double bond
  MOD_RES (15)..(15): Cyclohexyl-Gly
  MOD_RES (16)..(16): D-amino acid
  C-term NH2
DLTFAHHWHQLARRGL

SEQ ID NO: 44 - protein, 16 aa, Artificial Sequence
  Description of Artificial Sequence: Synthetic peptide
  N-term Ac
  MOD_RES (5)..(5): Alpha-Me R8-octenyl-alanine olefin amino acid connected by an all-carbon crosslinker comprising one double bond
  misc_feature (5)..(12): Crosslink between residues
  MOD_RES (12)..(12): Alpha-Me S5-pentenyl-alanine olefin amino acid connected by an all-carbon crosslinker comprising one double bond
  MOD_RES (15)..(15): Cyclohexyl-Ala
  MOD_RES (16)..(16): D-amino acid
  C-term NH2
HHTFAHHWHQLAAAAV

SEQ ID NO: 45 - protein, 13 aa, Artificial Sequence
  Description of Artificial Sequence: Synthetic peptide
  N-term Ac
  MOD_RES (2)..(2): Alpha-Me R8-octenyl-alanine olefin amino acid connected by an all-carbon crosslinker comprising one double bond
  misc_feature (2)..(9): Crosslink between residues
  MOD_RES (9)..(9): Alpha-Me S5-pentenyl-alanine olefin amino acid connected by an all-carbon crosslinker comprising one double bond
  MOD_RES (13)..(13): D-amino acid
  C-term NH2
FAHHWHQLARRDA

SEQ ID NO: 46 - protein, 13 aa, Artificial Sequence
  Description of Artificial Sequence: Synthetic peptide
  N-term Ac
  MOD_RES (2)..(2): Alpha-Me R8-octenyl-alanine olefin amino acid connected by an all-carbon crosslinker comprising one double bond
  misc_feature (2)..(9): Crosslink between residues
  MOD_RES (9)..(9): Alpha-Me S5-pentenyl-alanine olefin amino acid connected by an all-carbon crosslinker comprising one double bond
  MOD_RES (12)..(12): 2-aminoisobutyric acid
  C-term NH2
FAHHWHQLAHRXG

SEQ ID NO: 47 - protein, 13 aa, Artificial Sequence
  Description of Artificial Sequence: Synthetic peptide
  N-term Ac
  MOD_RES (2)..(2): Alpha-Me R8-octenyl-alanine olefin amino acid connected by an all-carbon crosslinker comprising one double bond
  misc_feature (2)..(9): Crosslink between residues
  MOD_RES (9)..(9): Alpha-Me S5-pentenyl-alanine olefin amino acid connected by an all-carbon crosslinker comprising one double bond
  MOD_RES (12)..(12): Norleucine
  C-term NH2
FAAYWAQLAHHLL

SEQ ID NO: 48 - protein, 13 aa, Artificial Sequence
  Description of Artificial Sequence: Synthetic peptide
  N-term Ac
  MOD_RES (2)..(2): Alpha-Me R8-octenyl-alanine olefin amino acid connected by an all-carbon crosslinker comprising one double bond
  misc_feature (2)..(9): Crosslink between residues
  MOD_RES (9)..(9): Alpha-Me S5-pentenyl-alanine olefin amino acid connected by an all-carbon crosslinker comprising one double bond
  MOD_RES (13)..(13): Norleucine
  C-term NH2
FAAYWSALAHQAL

SEQ ID NO: 49 - protein, 13 aa, Artificial Sequence
  Description of Artificial Sequence: Synthetic peptide
  N-term Ac
  MOD_RES (2)..(2): Alpha-Me R8-octenyl-alanine olefin amino acid connected by an all-carbon crosslinker comprising one double bond
  misc_feature (2)..(9): Crosslink between residues
  MOD_RES (9)..(9): Alpha-Me S5-pentenyl-alanine olefin amino acid connected by an all-carbon crosslinker comprising one double bond
  MOD_RES (12)..(12): Cyclohexyl-Gly
  MOD_RES (13)..(13): D-amino acid
  C-term NH2
FAAYWVQLAQHGL

SEQ ID NO: 50 - protein, 13 aa, Artificial Sequence
  Description of Artificial Sequence: Synthetic peptide
  N-term Ac
  MOD_RES (2)..(2): Alpha-Me R8-octenyl-alanine olefin amino acid connected by an all-carbon crosslinker comprising one double bond
  misc_feature (2)..(9): Crosslink between residues
  MOD_RES (9)..(9): Alpha-Me S5-pentenyl-alanine olefin amino acid connected by an all-carbon crosslinker comprising one double bond
  MOD_RES (12)..(12): Norleucine
  MOD_RES (13)..(13): D-amino acid
  C-term NH2
FAAYWTALAQQLV

SEQ ID NO: 51 - protein, 13 aa, Artificial Sequence
  Description of Artificial Sequence: Synthetic peptide
  N-term Ac
  MOD_RES (2)..(2): Alpha-Me R8-octenyl-alanine olefin amino acid connected by an all-carbon crosslinker comprising one double bond
  misc_feature (2)..(9): Crosslink between residues
  MOD_RES (9)..(9): Alpha-Me S5-pentenyl-alanine olefin amino acid connected by an all-carbon crosslinker comprising one double bond
  MOD_RES (11)..(11): 2-aminoisobutyric acid
  MOD_RES (13)..(13): D-amino acid
  C-term NH2
FAAYWYQLAHXAA

SEQ ID NO: 52 - protein, 15 aa, Artificial Sequence
  Description of Artificial Sequence: Synthetic peptide
  N-term Ac
  MOD_RES (4)..(4): Alpha-Me R8-octenyl-alanine olefin amino acid connected by an all-carbon crosslinker comprising one double bond
  misc_feature (4)..(11): Crosslink between residues
  MOD_RES (11)..(11): Alpha-Me S5-pentenyl-alanine olefin amino acid connected by an all-carbon crosslinker comprising one double bond
  MOD_RES (15)..(15): D-amino acid
  C-term NH2
LTFAAYWAQLAHHLA

SEQ ID NO: 53 - protein, 15 aa, Artificial Sequence
  Description of Artificial Sequence: Synthetic peptide
  N-term Ac
  MOD_RES (4)..(4): Alpha-Me R8-octenyl-alanine olefin amino acid connected by an all-carbon crosslinker comprising one double bond
  misc_feature (4)..(11): Crosslink between residues
  MOD_RES (11)..(11): Alpha-Me S5-pentenyl-alanine olefin amino acid connected by an all-carbon crosslinker comprising one double bond
  MOD_RES (15)..(15): D-amino acid
  C-term NH2
LTFAAYWAQLAHHLA

SEQ ID NO: 54 - protein, 15 aa, Artificial Sequence
  Description of Artificial Sequence: Synthetic peptide
  N-term Ac
  MOD_RES (4)..(4): Alpha-Me R8-octenyl-alanine olefin amino acid connected by an all-carbon crosslinker comprising one double bond
  misc_feature (4)..(11): Crosslink between residues
  MOD_RES (11)..(11): Alpha-Me S5-pentenyl-alanine olefin amino acid connected by an all-carbon crosslinker comprising one double bond
  MOD_RES (14)..(14): Norleucine
  MOD_RES (15)..(15): D-amino acid
  C-term NH2
LTFAAYWAQLAHQLV

SEQ ID NO: 55 - protein, 15 aa, Artificial Sequence
  Description of Artificial Sequence: Synthetic peptide
  N-term Ac
  MOD_RES (4)..(4): Alpha-Me R8-octenyl-alanine olefin amino acid connected by an all-carbon crosslinker comprising one double bond
  misc_feature (4)..(11): Crosslink between residues
  MOD_RES (11)..(11): Alpha-Me S5-pentenyl-alanine olefin amino acid connected by an all-carbon crosslinker comprising one double bond
  MOD_RES (14)..(14): Norleucine
  MOD_RES (15)..(15): D-amino acid
  C-term NH2
LTFAAYWAQLAHQLV

SEQ ID NO: 56 - protein, 15 aa, Artificial Sequence
  Description of Artificial Sequence: Synthetic peptide
  N-term Ac
  MOD_RES (4)..(4): Alpha-Me R8-octenyl-alanine olefin amino acid connected by an all-carbon crosslinker comprising one double bond
  misc_feature (4)..(11): Crosslink between residues
  MOD_RES (11)..(11): Alpha-Me S5-pentenyl-alanine olefin amino acid connected by an all-carbon crosslinker comprising one double bond
  MOD_RES (15)..(15): D-amino acid
  C-term NH2
LTFAAYWAQLAQQML

SEQ ID NO: 57 - protein, 15 aa, Artificial Sequence
  Description of Artificial Sequence: Synthetic peptide
  N-term Ac
  MOD_RES (4)..(4): Alpha-Me R8-octenyl-alanine olefin amino acid connected by an all-carbon crosslinker comprising one double bond
  misc_feature (4)..(11): Crosslink between residues
  MOD_RES (11)..(11): Alpha-Me S5-pentenyl-alanine olefin amino acid connected by an all-carbon crosslinker comprising one double bond
  MOD_RES (15)..(15): D-amino acid
  C-term NH2
LTFAAYWAQLAQQML

SEQ ID NO: 58 - protein, 15 aa, Artificial Sequence
  Description of Artificial Sequence: Synthetic peptide
  N-term Ac
  MOD_RES (4)..(4): Alpha-Me R8-octenyl-alanine olefin amino acid connected by an all-carbon crosslinker comprising one double bond
  misc_feature (4)..(11): Crosslink between residues
  MOD_RES (11)..(11): Alpha-Me S5-pentenyl-alanine olefin amino acid connected by an all-carbon crosslinker comprising one double bond
  MOD_RES (13)..(13): 2-aminoisobutyric acid
  MOD_RES (14)..(14): hLeu
  C-term NH2
LTFAAYWAQLAHXLV

SEQ ID NO: 59 - protein, 15 aa, Artificial Sequence
  Description of Artificial Sequence: Synthetic peptide
  N-term Ac
  MOD_RES (4)..(4): Alpha-Me R8-octenyl-alanine olefin amino acid connected by an all-carbon crosslinker comprising one double bond
  misc_feature (4)..(11): Crosslink between residues
  MOD_RES (11)..(11): Alpha-Me S5-pentenyl-alanine olefin amino acid connected by an all-carbon crosslinker comprising one double bond
  C-term NH2
LTFAAYWAQLAAHFA

SEQ ID NO: 60 - protein, 16 aa, Artificial Sequence
  Description of Artificial Sequence: Synthetic peptide
  N-term Ac
  MOD_RES (5)..(5): Alpha-Me R8-octenyl-alanine olefin amino acid connected by an all-carbon crosslinker comprising one double bond
  misc_feature (5)..(12): Crosslink between residues
  MOD_RES (12)..(12): Alpha-Me S5-pentenyl-alanine olefin amino acid connected by an all-carbon crosslinker comprising one double bond
  MOD_RES (15)..(15): Norleucine
  MOD_RES (16)..(16): D-amino acid
  C-term NH2
HLTFAHHWHQLAAALL

SEQ ID NO: 61 - protein, 16 aa, Artificial Sequence
  Description of Artificial Sequence: Synthetic peptide
  N-term Ac
  MOD_RES (5)..(5): Alpha-Me R8-octenyl-alanine olefin amino acid connected by an all-carbon crosslinker comprising one double bond
  misc_feature (5)..(12): Crosslink between residues
  MOD_RES (12)..(12): Alpha-Me S5-pentenyl-alanine olefin amino acid connected by an all-carbon crosslinker comprising one double bond
  MOD_RES (16)..(16): D-amino acid
  C-term NH2
DLTFAHHWHQLARRLA

SEQ ID NO: 62 - protein, 16 aa, Artificial Sequence
  Description of Artificial Sequence: Synthetic peptide
  N-term Ac
  MOD_RES (5)..(5): Alpha-Me R8-octenyl-alanine olefin amino acid connected by an all-carbon crosslinker comprising one double bond
  misc_feature (5)..(12): Crosslink between residues
  MOD_RES (12)..(12): Alpha-Me S5-pentenyl-alanine olefin amino acid connected by an all-carbon crosslinker comprising one double bond
  MOD_RES (16)..(16): D-amino acid
  C-term NH2
HHTFAHHWHQLAAAMV

SEQ ID NO: 63 - protein, 13 aa, Artificial Sequence
  Description of Artificial Sequence: Synthetic peptide
  N-term Ac
  MOD_RES (2)..(2): Alpha-Me R8-octenyl-alanine olefin amino acid connected by an all-carbon crosslinker comprising one double bond
  misc_feature (2)..(9): Crosslink between residues
  MOD_RES (9)..(9): Alpha-Me S5-pentenyl-alanine olefin amino acid connected by an all-carbon crosslinker comprising one double bond
  C-term NH2
FAHHWHQLARRDA

SEQ ID NO: 64 - protein, 13 aa, Artificial Sequence
  Description of Artificial Sequence: Synthetic peptide
  N-term Ac
  MOD_RES (2)..(2): Alpha-Me R8-octenyl-alanine olefin amino acid connected by an all-carbon crosslinker comprising one double bond
  misc_feature (2)..(9): Crosslink between residues
  MOD_RES (9)..(9): Alpha-Me S5-pentenyl-alanine olefin amino acid connected by an all-carbon crosslinker comprising one double bond
  MOD_RES (13)..(13): Cyclohexyl-Ala
  C-term NH2
FAHHWHQLAHRFA

SEQ ID NO: 65 - protein, 11 aa, Artificial Sequence
  Description of Artificial Sequence: Synthetic peptide
  N-term Ac
  MOD_RES (2)..(2): Alpha-Me R8-octenyl-alanine olefin amino acid connected by an all-carbon crosslinker comprising one double bond
  misc_feature (2)..(9): Crosslink between residues
  MOD_RES (9)..(9): Alpha-Me S5-pentenyl-alanine olefin amino acid connected by an all-carbon crosslinker comprising one double bond
  C-term NHAm
FAAYWEALAAA

SEQ ID NO: 66 - protein, 11 aa, Artificial Sequence
  Description of Artificial Sequence: Synthetic peptide
  N-term Ac
  MOD_RES (2)..(2): Alpha-Me R8-octenyl-alanine olefin amino acid connected by an all-carbon crosslinker comprising one double bond
  misc_feature (2)..(9): Crosslink between residues
  MOD_RES (9)..(9): Alpha-Me S5-pentenyl-alanine olefin amino acid connected by an all-carbon crosslinker comprising one double bond
  C-term NHiAm
FAAYWEALAAA

SEQ ID NO: 67 - protein, 11 aa, Artificial Sequence
  Description of Artificial Sequence: Synthetic peptide
  N-term Ac
  MOD_RES (2)..(2): Alpha-Me R8-octenyl-alanine olefin amino acid connected by an all-carbon crosslinker comprising one double bond
  misc_feature (2)..(9): Crosslink between residues
  MOD_RES (9)..(9): Alpha-Me S5-pentenyl-alanine olefin amino acid connected by an all-carbon crosslinker comprising one double bond
  C-term NHnPr3Ph
FAAYWEALAAA

SEQ ID NO: 68 - protein, 11 aa, Artificial Sequence
  Description of Artificial Sequence: Synthetic peptide
  N-term Ac
  MOD_RES (2)..(2): Alpha-Me R8-octenyl-alanine olefin amino acid connected by an all-carbon crosslinker comprising one double bond
  misc_feature (2)..(9): Crosslink between residues
  MOD_RES (9)..(9): Alpha-Me S5-pentenyl-alanine olefin amino acid connected by an all-carbon crosslinker comprising one double bond
  C-term NHnBu33Me
FAAYWEALAAA

SEQ ID NO: 69 - protein, 11 aa, Artificial Sequence
  Description of Artificial Sequence: Synthetic peptide
  N-term Ac
  MOD_RES (2)..(2): Alpha-Me R8-octenyl-alanine olefin amino acid connected by an all-carbon crosslinker comprising one double bond
  misc_feature (2)..(9): Crosslink between residues
  MOD_RES (9)..(9): Alpha-Me S5-pentenyl-alanine olefin amino acid connected by an all-carbon crosslinker comprising one double bond
  C-term NHnPr
FAAYWEALAAA

SEQ ID NO: 70 - protein, 11 aa, Artificial Sequence
  Description of Artificial Sequence: Synthetic peptide
  N-term Ac
  MOD_RES (2)..(2): Alpha-Me R8-octenyl-alanine olefin amino acid connected by an all-carbon crosslinker comprising one double bond
  misc_feature (2)..(9): Crosslink between residues
  MOD_RES (9)..(9): Alpha-Me S5-pentenyl-alanine olefin amino acid connected by an all-carbon crosslinker comprising one double bond
  C-term NHnEt2Ch
FAAYWEALAAA

SEQ ID NO: 71 - protein, 11 aa, Artificial Sequence
  Description of Artificial Sequence: Synthetic peptide
  N-term Ac
  MOD_RES (2)..(2): Alpha-Me R8-octenyl-alanine olefin amino acid connected by an all-carbon crosslinker comprising one double bond
  misc_feature (2)..(9): Crosslink between residues
  MOD_RES (9)..(9): Alpha-Me S5-pentenyl-alanine olefin amino acid connected by an all-carbon crosslinker comprising one double bond
  C-term NHnEt2Cp
FAAYWEALAAA

SEQ ID NO: 72 - protein, 11 aa, Artificial Sequence
  Description of Artificial Sequence: Synthetic peptide
  N-term Ac
  MOD_RES (2)..(2): Alpha-Me R8-octenyl-alanine olefin amino acid connected by an all-carbon crosslinker comprising one double bond
  misc_feature (2)..(9): Crosslink between residues
  MOD_RES (9)..(9): Alpha-Me S5-pentenyl-alanine olefin amino acid connected by an all-carbon crosslinker comprising one double bond
  C-term NHHex
FAAYWEALAAA

SEQ ID NO: 73 - protein, 15 aa, Artificial Sequence
  Description of Artificial Sequence: Synthetic peptide
  N-term Ac
  MOD_RES (4)..(4): Alpha-Me R8-octenyl-alanine olefin amino acid connected by an all-carbon crosslinker comprising one double bond
  misc_feature (4)..(11): Crosslink between residues
  MOD_RES (11)..(11): Alpha-Me S5-pentenyl-alanine olefin amino acid connected by an all-carbon crosslinker comprising one double bond
  C-term NH2
LTFAAYWAQLAAAIA

SEQ ID NO: 74 - protein, 15 aa, Artificial Sequence
  Description of Artificial Sequence: Synthetic peptide
  N-term Ac
  MOD_RES (4)..(4): Alpha-Me R8-octenyl-alanine olefin amino acid connected by an all-carbon crosslinker comprising one double bond
  misc_feature (4)..(11): Crosslink between residues
  MOD_RES (11)..(11): Alpha-Me S5-pentenyl-alanine olefin amino acid connected by an all-carbon crosslinker comprising one double bond
  C-term NH2
LTFAAYWAQLAAAIA

SEQ ID NO: 75 - protein, 15 aa, Artificial Sequence
  Description of Artificial Sequence: Synthetic peptide
  N-term Ac
  MOD_RES (4)..(4): Alpha-Me R8-octenyl-alanine olefin amino acid connected by an all-carbon crosslinker comprising one double bond
  misc_feature (4)..(11): Crosslink between residues
  MOD_RES (11)..(11): Alpha-Me S5-pentenyl-alanine olefin amino acid connected by an all-carbon crosslinker comprising one double bond
  C-term NH2
LTFAAYWAALAAAMA

SEQ ID NO: 76 - protein, 15 aa, Artificial Sequence
  Description of Artificial Sequence: Synthetic peptide
  N-term Ac
  MOD_RES (4)..(4): Alpha-Me R8-octenyl-alanine olefin amino acid connected by an all-carbon crosslinker comprising one double bond
  misc_feature (4)..(11): Crosslink between residues
  MOD_RES (11)..(11): Alpha-Me S5-pentenyl-alanine olefin amino acid connected by an all-carbon crosslinker comprising one double bond
  C-term NH2
LTFAAYWAALAAAMA

SEQ ID NO: 77 - protein, 15 aa, Artificial Sequence
  Description of Artificial Sequence: Synthetic peptide
  N-term Ac
  MOD_RES (4)..(4): Alpha-Me R8-octenyl-alanine olefin amino acid connected by an all-carbon crosslinker comprising one double bond
  misc_feature (4)..(11): Crosslink between residues
  MOD_RES (11)..(11): Alpha-Me S5-pentenyl-alanine olefin amino acid connected by an all-carbon crosslinker comprising one double bond
  MOD_RES (14)..(14): Norleucine
  C-term NH2
LTFAAYWAQLAAALA

SEQ ID NO: 78 - protein, 15 aa, Artificial Sequence
  Description of Artificial Sequence: Synthetic peptide
  N-term Ac
  MOD_RES (4)..(4): Alpha-Me R8-octenyl-alanine olefin amino acid connected by an all-carbon crosslinker comprising one double bond
  misc_feature (4)..(11): Crosslink between residues
  MOD_RES (11)..(11): Alpha-Me S5-pentenyl-alanine olefin amino acid connected by an all-carbon crosslinker comprising one double bond
  MOD_RES (14)..(14): Norleucine
  C-term NH2
LTFAAYWAQLAAALA

SEQ ID NO: 79 - protein, 15 aa, Artificial Sequence
  Description of Artificial Sequence: Synthetic peptide
  N-term Ac
  MOD_RES (4)..(4): Alpha-Me R8-octenyl-alanine olefin amino acid connected by an all-carbon crosslinker comprising one double bond
  misc_feature (4)..(11): Crosslink between residues
  MOD_RES (11)..(11): Alpha-Me S5-pentenyl-alanine olefin amino acid connected by an all-carbon crosslinker comprising one double bond
  MOD_RES (15)..(15): D-amino acid
  C-term NH2
LTFAAYWAQLAAAIA

SEQ ID NO: 80 - protein, 15 aa, Artificial Sequence
  Description of Artificial Sequence: Synthetic peptide
  N-term Ac
  MOD_RES (4)..(4): Alpha-Me R8-octenyl-alanine olefin amino acid connected by an all-carbon crosslinker comprising one double bond
  misc_feature (4)..(11): Crosslink between residues
  MOD_RES (11)..(11): Alpha-Me S5-pentenyl-alanine olefin amino acid connected by an all-carbon crosslinker comprising one double bond
  MOD_RES (15)..(15): D-amino acid
  C-term NH2
LTFAAYWAQLAAAIA

SEQ ID NO: 81 - protein, 15 aa, Artificial Sequence
  Description of Artificial Sequence: Synthetic peptide
  N-term Ac
  MOD_RES (4)..(4): Alpha-Me R8-octenyl-alanine olefin amino acid connected by an all-carbon crosslinker comprising one double bond
  misc_feature (4)..(11): Crosslink between residues
  MOD_RES (11)..(11): Alpha-Me S5-pentenyl-alanine olefin amino acid connected by an all-carbon crosslinker comprising one double bond
  MOD_RES (15)..(15): D-amino acid
  C-term NH2
LTFAAYWAALAAAMA

SEQ ID NO: 82 - protein, 15 aa, Artificial Sequence
  Description of Artificial Sequence: Synthetic peptide
  N-term Ac
  MOD_RES (4)..(4): Alpha-Me R8-octenyl-alanine olefin amino acid connected by an all-carbon crosslinker comprising one double bond
  misc_feature (4)..(11): Crosslink between residues
  MOD_RES (11)..(11): Alpha-Me S5-pentenyl-alanine olefin amino acid connected by an all-carbon crosslinker comprising one double bond
  MOD_RES (15)..(15): D-amino acid
  C-term NH2
LTFAAYWAALAAAMA

SEQ ID NO: 83 - protein, 15 aa, Artificial Sequence
  Description of Artificial Sequence: Synthetic peptide
  N-term Ac
  MOD_RES (4)..(4): Alpha-Me R8-octenyl-alanine olefin amino acid connected by an all-carbon crosslinker comprising one double bond
  misc_feature (4)..(11): Crosslink between residues
  MOD_RES (11)..(11): Alpha-Me S5-pentenyl-alanine olefin amino acid connected by an all-carbon crosslinker comprising one double bond
  MOD_RES (14)..(14): Norleucine
  MOD_RES (15)..(15): D-amino acid
  C-term NH2
LTFAAYWAQLAAALA

SEQ ID NO: 84 - protein, 15 aa, Artificial Sequence
  Description of Artificial Sequence: Synthetic peptide
  N-term Ac
  MOD_RES (4)..(4): Alpha-Me R8-octenyl-alanine olefin amino acid connected by an all-carbon crosslinker comprising one double bond
  misc_feature (4)..(11): Crosslink between residues
  MOD_RES (11)..(11): Alpha-Me S5-pentenyl-alanine olefin amino acid connected by an all-carbon crosslinker comprising one double bond
  MOD_RES (14)..(14): Norleucine
  MOD_RES (15)..(15): D-amino acid
  C-term NH2
LTFAAYWAQLAAALA

SEQ ID NO: 85 - protein, 15 aa, Artificial Sequence
  Description of Artificial Sequence: Synthetic peptide
  N-term Ac
  MOD_RES (4)..(4): Alpha-Me R8-octenyl-alanine olefin amino acid connected by an all-carbon crosslinker comprising one double bond
  misc_feature (4)..(11): Crosslink between residues
  MOD_RES (11)..(11): Alpha-Me S5-pentenyl-alanine olefin amino acid connected by an all-carbon crosslinker comprising one double bond
  MOD_RES (15)..(15): D-amino acid
  C-term NH2
LTFAAYWAALAAAIV

SEQ ID NO: 86 - protein, 15 aa, Artificial Sequence
  Description of Artificial Sequence: Synthetic peptide
  N-term Ac
  MOD_RES (4)..(4): Alpha-Me R8-octenyl-alanine olefin amino acid connected by an all-carbon crosslinker comprising one double bond
  misc_feature (4)..(11): Crosslink between residues
  MOD_RES (11)..(11): Alpha-Me S5-pentenyl-alanine olefin amino acid connected by an all-carbon crosslinker comprising one double bond
  MOD_RES (15)..(15): D-amino acid
  C-term NH2
LTFAAYWAALAAAIV

SEQ ID NO: 87 - protein, 15 aa, Artificial Sequence
  Description of Artificial Sequence: Synthetic peptide
  N-term Ac
  MOD_RES (4)..(4): Alpha-Me R8-octenyl-alanine olefin amino acid connected by an all-carbon crosslinker comprising one double bond
  misc_feature (4)..(11): Crosslink between residues
  MOD_RES (11)..(11): Alpha-Me S5-pentenyl-alanine olefin amino acid connected by an all-carbon crosslinker comprising one double bond
  MOD_RES (15)..(15): D-amino acid
  C-term NH2
LTFAAYWAQLAAAMV

SEQ ID NO: 88 - protein, 15 aa, Artificial Sequence
  Description of Artificial Sequence: Synthetic peptide
  N-term Ac
  MOD_RES (4)..(4): Alpha-Me R8-octenyl-alanine olefin amino acid connected by an all-carbon crosslinker comprising one double bond
  misc_feature (4)..(11): Crosslink between residues
  MOD_RES (11)..(11): Alpha-Me S5-pentenyl-alanine olefin amino acid connected by an all-carbon crosslinker comprising one double bond
  MOD_RES (14)..(14): Norleucine
  MOD_RES (15)..(15): D-amino acid
  C-term NH2
LTFAAYWAALAAALV

SEQ ID NO: 89 - protein, 15 aa, Artificial Sequence
  Description of Artificial Sequence: Synthetic peptide
  N-term Ac
  MOD_RES (4)..(4): Alpha-Me R8-octenyl-alanine olefin amino acid connected by an all-carbon crosslinker comprising one double bond
  misc_feature (4)..(11): Crosslink between residues
  MOD_RES (11)..(11): Alpha-Me S5-pentenyl-alanine olefin amino acid connected by an all-carbon crosslinker comprising one double bond
  MOD_RES (14)..(14): Norleucine
  MOD_RES (15)..(15): D-amino acid
  C-term NH2
LTFAAYWAALAAALV

SEQ ID NO: 90 - protein, 15 aa, Artificial Sequence
  Description of Artificial Sequence: Synthetic peptide
  N-term Ac
  MOD_RES (4)..(4): Alpha-Me R8-octenyl-alanine olefin amino acid connected by an all-carbon crosslinker comprising one double bond
  misc_feature (4)..(11): Crosslink between residues
  MOD_RES (11)..(11): Alpha-Me S5-pentenyl-alanine olefin amino acid connected by an all-carbon crosslinker comprising one double bond
  MOD_RES (15)..(15): D-amino acid
  C-term NH2
LTFAAYWAQLAAAIL

SEQ ID NO: 91 - protein, 15 aa, Artificial Sequence
  Description of Artificial Sequence: Synthetic peptide
  N-term Ac
  MOD_RES (4)..(4): Alpha-Me R8-octenyl-alanine olefin amino acid connected by an all-carbon crosslinker comprising one double bond
  misc_feature (4)..(11): Crosslink between residues
  MOD_RES (11)..(11): Alpha-Me S5-pentenyl-alanine olefin amino acid connected by an all-carbon crosslinker comprising one double bond
  MOD_RES (15)..(15): D-amino acid
  C-term NH2
LTFAAYWAQLAAAIL

SEQ ID NO: 92 - protein, 15 aa, Artificial Sequence
  Description of Artificial Sequence: Synthetic peptide
  N-term Ac
  MOD_RES (4)..(4): Alpha-Me R8-octenyl-alanine olefin amino acid connected by an all-carbon crosslinker comprising one double bond
  misc_feature (4)..(11): Crosslink between residues
  MOD_RES (11)..(11): Alpha-Me S5-pentenyl-alanine olefin amino acid connected by an all-carbon crosslinker comprising one double bond
  MOD_RES (15)..(15): D-amino acid
  C-term NH2
LTFAAYWAALAAAML

SEQ ID NO: 93 - protein, 15 aa, Artificial Sequence
  Description of Artificial Sequence: Synthetic peptide
  N-term Ac
  MOD_RES (4)..(4): Alpha-Me R8-octenyl-alanine olefin amino acid connected by an all-carbon crosslinker comprising one double bond
  misc_feature (4)..(11): Crosslink between residues
  MOD_RES (11)..(11): Alpha-Me S5-pentenyl-alanine olefin amino acid connected by an all-carbon crosslinker comprising one double bond
  MOD_RES (14)..(14): Norleucine
  MOD_RES (15)..(15): D-amino acid
  C-term NH2
LTFAAYWAQLAAALL

SEQ ID NO: 94 - protein, 15 aa, Artificial Sequence
  Description of Artificial Sequence: Synthetic peptide
  N-term Ac
  MOD_RES (4)..(4): Alpha-Me R8-octenyl-alanine olefin amino acid connected by an all-carbon crosslinker comprising one double bond
  misc_feature (4)..(11): Crosslink between residues
  MOD_RES (11)..(11): Alpha-Me S5-pentenyl-alanine olefin amino acid connected by an all-carbon crosslinker comprising one double bond
  MOD_RES (14)..(14): Norleucine
  MOD_RES (15)..(15): D-amino acid
  C-term NH2
LTFAAYWAQLAAALL

SEQ ID NO: 95 - protein, 13 aa, Artificial Sequence
  Description of Artificial Sequence: Synthetic peptide
  N-term Ac
  MOD_RES (2)..(2): Alpha-Me R8-octenyl-alanine olefin amino acid connected by an all-carbon crosslinker comprising one double bond
  misc_feature (2)..(9): Crosslink between residues
  MOD_RES (9)..(9): Alpha-Me S5-pentenyl-alanine olefin amino acid connected by an all-carbon crosslinker comprising one double bond
  C-term NH2
FAAYWEALAAAMA

SEQ ID NO: 96 - protein, 13 aa, Artificial Sequence
  Description of Artificial Sequence: Synthetic peptide
  N-term Ac
  MOD_RES (2)..(2): Alpha-Me R8-octenyl-alanine olefin amino acid connected by an all-carbon crosslinker comprising one double bond
  misc_feature (2)..(9): Crosslink between residues
  MOD_RES (9)..(9): Alpha-Me S5-pentenyl-alanine olefin amino acid connected by an all-carbon crosslinker comprising one double bond
  MOD_RES (12)..(12): Norleucine
  C-term NH2
FAAYWEALAAALA

SEQ ID NO: 97 - protein, 13 aa, Artificial Sequence
  Description of Artificial Sequence: Synthetic peptide
  N-term Ac
  MOD_RES (2)..(2): Alpha-Me R8-octenyl-alanine olefin amino acid connected by an all-carbon crosslinker comprising one double bond
  misc_feature (2)..(9): Crosslink between residues
  MOD_RES (9)..(9): Alpha-Me S5-pentenyl-alanine olefin amino acid connected by an all-carbon crosslinker comprising one double bond
  MOD_RES (13)..(13): D-amino acid
  C-term NH2
FAAYWEALAAAIA

SEQ ID NO: 98 - protein, 13 aa, Artificial Sequence
  Description of Artificial Sequence: Synthetic peptide
  N-term Ac
  MOD_RES (2)..(2): Alpha-Me R8-octenyl-alanine olefin amino acid connected by an all-carbon crosslinker comprising one double bond
  misc_feature (2)..(9): Crosslink between residues
  MOD_RES (9)..(9): Alpha-Me S5-pentenyl-alanine olefin amino acid connected by an all-carbon crosslinker comprising one double bond
  MOD_RES (13)..(13): D-amino acid
  C-term NH2
FAAYWEALAAAMA

SEQ ID NO: 99 - protein, 13 aa, Artificial Sequence
  Description of Artificial Sequence: Synthetic peptide
  N-term Ac
  MOD_RES (2)..(2): Alpha-Me R8-octenyl-alanine olefin amino acid connected by an all-carbon crosslinker comprising one double bond
  misc_feature (2)..(9): Crosslink between residues
  MOD_RES (9)..(9): Alpha-Me S5-pentenyl-alanine olefin amino acid connected by an all-carbon crosslinker comprising one double bond
  MOD_RES (12)..(12): Norleucine
  MOD_RES (13)..(13): D-amino acid
  C-term NH2
FAAYWEALAAALA

SEQ ID NO: 100 - protein, 13 aa, Artificial Sequence
  Description of Artificial Sequence: Synthetic peptide
  N-term Ac
  MOD_RES (2)..(2): Alpha-Me R8-octenyl-alanine olefin amino acid connected by an all-carbon crosslinker comprising one double bond
  misc_feature (2)..(9): Crosslink between residues
  MOD_RES (9)..(9): Alpha-Me S5-pentenyl-alanine olefin amino acid connected by an all-carbon crosslinker comprising one double bond
  MOD_RES (13)..(13): D-amino acid
  C-term NH2
FAAYWEALAAAIV

SEQ ID NO: 101 - protein, 13 aa, Artificial Sequence
  Description of Artificial Sequence: Synthetic peptide
  N-term Ac
  MOD_RES (2)..(2): Alpha-Me R8-octenyl-alanine olefin amino acid connected by an all-carbon crosslinker comprising one double bond
  misc_feature (2)..(9): Crosslink between residues
  MOD_RES (9)..(9): Alpha-Me S5-pentenyl-alanine olefin amino acid connected by an all-carbon crosslinker comprising one double bond
  MOD_RES (13)..(13): D-amino acid
  C-term NH2
FAAYWEALAAAMV

SEQ ID NO: 102 - protein, 13 aa, Artificial Sequence
  Description of Artificial Sequence: Synthetic peptide
  N-term Ac
  MOD_RES (2)..(2): Alpha-Me R8-octenyl-alanine olefin amino acid connected by an all-carbon crosslinker comprising one double bond
  misc_feature (2)..(9): Crosslink between residues
  MOD_RES (9)..(9): Alpha-Me S5-pentenyl-alanine olefin amino acid connected by an all-carbon crosslinker comprising one double bond
  MOD_RES (12)..(12): Norleucine
  MOD_RES (13)..(13): D-amino acid
  C-term NH2
FAAYWEALAAALV

SEQ ID NO: 103 - protein, 13 aa, Artificial Sequence
  Description of Artificial Sequence: Synthetic peptide
  N-term Ac
  MOD_RES (2)..(2): Alpha-Me R8-octenyl-alanine olefin amino acid connected by an all-carbon crosslinker comprising one double bond
  misc_feature (2)..(9): Crosslink between residues
  MOD_RES (9)..(9): Alpha-Me S5-pentenyl-alanine olefin amino acid connected by an all-carbon crosslinker comprising one double bond
  MOD_RES (13)..(13): D-amino acid
  C-term NH2
FAAYWEALAAAIL

SEQ ID NO: 104 - protein, 13 aa, Artificial Sequence
  Description of Artificial Sequence: Synthetic peptide
  N-term Ac
  MOD_RES (2)..(2): Alpha-Me R8-octenyl-alanine olefin amino acid connected by an all-carbon crosslinker comprising one double bond
  misc_feature (2)..(9): Crosslink between residues
  MOD_RES (9)..(9): Alpha-Me S5-pentenyl-alanine olefin amino acid connected by an all-carbon crosslinker comprising one double bond
  MOD_RES (13)..(13): D-amino acid
  C-term NH2
FAAYWEALAAAML

SEQ ID NO: 105 - protein, 13 aa, Artificial Sequence
  Description of Artificial Sequence: Synthetic peptide
  N-term Ac
  MOD_RES (2)..(2): Alpha-Me R8-octenyl-alanine olefin amino acid connected by an all-carbon crosslinker comprising one double bond
  misc_feature (2)..(9): Crosslink between residues
  MOD_RES (9)..(9): Alpha-Me S5-pentenyl-alanine olefin amino acid connected by an all-carbon crosslinker comprising one double bond
  MOD_RES (12)..(12): Norleucine
  MOD_RES (13)..(13): D-amino acid
  C-term NH2
FAAYWEALAAALL

SEQ ID NO: 106 - protein, 13 aa, Artificial Sequence
  Description of Artificial Sequence: Synthetic peptide
  N-term Ac
  MOD_RES (2)..(2): Alpha-Me R8-octenyl-alanine olefin amino acid connected by an all-carbon crosslinker comprising one double bond
  misc_feature (2)..(9): Crosslink between residues
  MOD_RES (9)..(9): Alpha-Me S5-pentenyl-alanine olefin amino acid connected by an all-carbon crosslinker comprising one double bond
  MOD_RES (12)..(12): Norleucine
  MOD_RES (13)..(13): D-amino acid
  C-term NH2
FAAYWEALAAALL

SEQ ID NO: 107 - protein, 14 aa, Artificial Sequence
  Description of Artificial Sequence: Synthetic peptide
  N-term Ac
  MOD_RES (4)..(4): Alpha-Me R8-octenyl-alanine olefin amino acid connected by an all-carbon crosslinker comprising one double bond
  misc_feature (4)..(11): Crosslink between residues
  MOD_RES (7)..(7): 6cl-Trp
  MOD_RES (11)..(11): Alpha-Me S5-pentenyl-alanine olefin amino acid connected by an all-carbon crosslinker comprising one double bond
  C-term NH2
LTFAAYWAQLASAA

SEQ ID NO: 108 - protein, 14 aa, Artificial Sequence
  Description of Artificial Sequence: Synthetic peptide
  N-term Ac
  MOD_RES (4)..(4): Alpha-Me R8-octenyl-alanine olefin amino acid connected by an all-carbon crosslinker comprising one double bond
  misc_feature (4)..(11): Crosslink between residues
  MOD_RES (7)..(7): 6cl-Trp
  MOD_RES (11)..(11): Alpha-Me S5-pentenyl-alanine olefin amino acid connected by an all-carbon crosslinker comprising one double bond
  C-term NH2
LTFAAYWAQLASAA

SEQ ID NO: 109 - protein, 15 aa, Artificial Sequence
  Description of Artificial Sequence: Synthetic peptide
  N-term Ac
  MOD_RES (4)..(4): Alpha-Me R8-octenyl-alanine olefin amino acid connected by an all-carbon crosslinker comprising one double bond
  misc_feature (4)..(11): Crosslink between residues
  MOD_RES (11)..(11): Alpha-Me S5-pentenyl-alanine olefin amino acid connected by an all-carbon crosslinker comprising one double bond
  MOD_RES (15)..(15): D-amino acid
  C-term NH2
WTFAFYWSQLAAVAA

SEQ ID NO: 110 - protein, 15 aa, Artificial Sequence
  Description of Artificial Sequence: Synthetic peptide
  N-term Ac
  MOD_RES (4)..(4): Alpha-Me R8-octenyl-alanine olefin amino acid connected by an all-carbon crosslinker comprising one double bond
  misc_feature (4)..(11): Crosslink between residues
  MOD_RES (11)..(11): Alpha-Me S5-pentenyl-alanine olefin amino acid connected by an all-carbon crosslinker comprising one double bond
  MOD_RES (15)..(15): D-amino acid
  C-term NH2
WTFAFYWSQLAAVAA

SEQ ID NO: 111 - protein, 14 aa, Artificial Sequence
  Description of Artificial Sequence: Synthetic peptide
  N-term Ac
  MOD_RES (4)..(4): Alpha-Me R8-octenyl-alanine olefin amino acid connected by an all-carbon crosslinker comprising one double bond
  misc_feature (4)..(11): Crosslink between residues
  MOD_RES (11)..(11): Alpha-Me S5-pentenyl-alanine olefin amino acid connected by an all-carbon crosslinker comprising one double bond
  C-term NH2
WTFAVYWSQLAAVA

SEQ ID NO: 112 - protein, 14 aa, Artificial Sequence
  Description of Artificial Sequence: Synthetic peptide
  N-term Ac
  MOD_RES (4)..(4): Alpha-Me R8-octenyl-alanine olefin amino acid connected by an all-carbon crosslinker comprising one double bond
  misc_feature (4)..(11): Crosslink between residues
  MOD_RES (11)..(11): Alpha-Me S5-pentenyl-alanine olefin amino acid connected by an all-carbon crosslinker comprising one double bond
  C-term NH2
WTFAVYWSQLAAVA

SEQ ID NO: 113 - protein, 15 aa, Artificial Sequence
  Description of Artificial Sequence: Synthetic peptide
  N-term Ac
  MOD_RES (4)..(4): Alpha-Me R8-octenyl-alanine olefin amino acid connected by an all-carbon crosslinker comprising one double bond
  misc_feature (4)..(11): Crosslink between residues
  MOD_RES (11)..(11): Alpha-Me S5-pentenyl-alanine olefin amino acid connected by an all-carbon crosslinker comprising one double bond
  MOD_RES (15)..(15): D-amino acid
  C-term NH2
WTFAFYWSQLASAAA

SEQ ID NO: 114 - protein, 15 aa, Artificial Sequence
  Description of Artificial Sequence: Synthetic peptide
  N-term Ac
  MOD_RES (4)..(4): Alpha-Me R8-octenyl-alanine olefin amino acid connected by an all-carbon crosslinker comprising one double bond
  misc_feature (4)..(11): Crosslink between residues
  MOD_RES (11)..(11): Alpha-Me S5-pentenyl-alanine olefin amino acid connected by an all-carbon crosslinker comprising one double bond
  MOD_RES (15)..(15): D-amino acid
  C-term NH2
WTFAFYWSQLASAAA

SEQ ID NO: 115 - protein, 16 aa, Artificial Sequence
  Description of Artificial Sequence: Synthetic peptide
  N-term Ac
  MOD_RES (4)..(4): Alpha-Me R8-octenyl-alanine olefin amino acid connected by an all-carbon crosslinker comprising one double bond
  misc_feature (4)..(11): Crosslink between residues
  MOD_RES (11)..(11): Alpha-Me S5-pentenyl-alanine olefin amino acid connected by an all-carbon crosslinker comprising one double bond
  MOD_RES (15)..(16): D-amino acid
  C-term NH2
WTFAVYWSQLAAVAAA

SEQ ID NO: 116 - protein, 16 aa, Artificial Sequence
  Description of Artificial Sequence: Synthetic peptide
  N-term Ac
  MOD_RES (4)..(4): Alpha-Me R8-octenyl-alanine olefin amino acid connected by an all-carbon crosslinker comprising one double bond
  misc_feature (4)..(11): Crosslink between residues
  MOD_RES (11)..(11): Alpha-Me S5-pentenyl-alanine olefin amino acid connected by an all-carbon crosslinker comprising one double bond
  MOD_RES (15)..(16): D-amino acid
  C-term NH2
WTFAVYWSQLAAVAAA

SEQ ID NO: 117 - protein, 14 aa, Artificial Sequence
  Description of Artificial Sequence: Synthetic peptide
  N-term Ac
  MOD_RES (4)..(4): Alpha-Me R8-octenyl-alanine olefin amino acid connected by an all-carbon crosslinker comprising one double bond
  misc_feature (4)..(11): Crosslink between residues
  MOD_RES (11)..(11): Alpha-Me S5-pentenyl-alanine olefin amino acid connected by an all-carbon crosslinker comprising one double bond
  C-term NH2
LTFAAYWAQLAAVG

SEQ ID NO: 118 - protein, 14 aa, Artificial Sequence
  Description of Artificial Sequence: Synthetic peptide
  N-term Ac
  MOD_RES (4)..(4): Alpha-Me R8-octenyl-alanine olefin amino acid connected by an all-carbon crosslinker comprising one double bond
  misc_feature (4)..(11): Crosslink between residues
  MOD_RES (11)..(11): Alpha-Me S5-pentenyl-alanine olefin amino acid connected by an all-carbon crosslinker comprising one double bond
  C-term NH2
LTFAAYWAQLAAVG

SEQ ID NO: 119 - protein, 14 aa, Artificial Sequence
  Description of Artificial Sequence: Synthetic peptide
  N-term Ac
  MOD_RES (4)..(4): Alpha-Me R8-octenyl-alanine olefin amino acid connected by an all-carbon crosslinker comprising one double bond
  misc_feature (4)..(11): Crosslink between residues
  MOD_RES (11)..(11): Alpha-Me S5-pentenyl-alanine olefin amino acid connected by an all-carbon crosslinker comprising one double bond
  C-term NH2
LTFAAYWAQLAAVQ

SEQ ID NO: 120 - protein, 14 aa, Artificial Sequence
  Description of Artificial Sequence: Synthetic peptide
  N-term Ac
  MOD_RES (4)..(4): Alpha-Me R8-octenyl-alanine olefin amino acid connected by an all-carbon crosslinker comprising one double bond
  misc_feature (4)..(11): Crosslink between residues
  MOD_RES (11)..(11): Alpha-Me S5-pentenyl-alanine olefin amino acid connected by an all-carbon crosslinker comprising one double bond
  C-term NH2
LTFAAYWAQLAAVQ

SEQ ID NO: 121 - protein, 14 aa, Artificial Sequence
  Description of Artificial Sequence: Synthetic peptide
  N-term Ac
  MOD_RES (4)..(4): Alpha-Me R8-octenyl-alanine olefin amino acid connected by an all-carbon crosslinker comprising one double bond
  misc_feature (4)..(11): Crosslink between residues
  MOD_RES (11)..(11): Alpha-Me S5-pentenyl-alanine olefin amino acid connected by an all-carbon crosslinker comprising one double bond
  MOD_RES (14)..(14): D-amino acid
  C-term NH2
LTFAAYWAQLASAA

SEQ ID NO: 122 - protein, 14 aa, Artificial Sequence
  Description of Artificial Sequence: Synthetic peptide
  N-term Ac
  MOD_RES (4)..(4): Alpha-Me R8-octenyl-alanine olefin amino acid connected by an all-carbon crosslinker comprising one double bond
  misc_feature (4)..(11): Crosslink between residues
  MOD_RES (11)..(11): Alpha-Me S5-pentenyl-alanine olefin amino acid connected by an all-carbon crosslinker comprising one double bond
  MOD_RES (14)..(14): D-amino acid
  C-term NH2
LTFAAYWAQLASAA

SEQ ID NO: 123 - protein, 14 aa, Artificial Sequence
  Description of Artificial Sequence: Synthetic peptide
  N-term Ac
  MOD_RES (4)..(4): Alpha-Me R8-octenyl-alanine olefin amino acid connected by an all-carbon crosslinker comprising one double bond
  misc_feature (4)..(11): Crosslink between residues
  MOD_RES (10)..(10): hLeu
  MOD_RES (11)..(11): Alpha-Me S5-pentenyl-alanine olefin amino acid connected by an all-carbon crosslinker comprising one double bond
  C-term NH2
LTFAAYWAQLASAA

SEQ ID NO: 124 - protein, 14 aa, Artificial Sequence
  Description of Artificial Sequence: Synthetic peptide
  N-term Ac
  MOD_RES (4)..(4): Alpha-Me R8-octenyl-alanine olefin amino acid connected by an all-carbon crosslinker comprising one double bond
  misc_feature (4)..(11): Crosslink between residues
  MOD_RES (10)..(10): hLeu
  MOD_RES (11)..(11): Alpha-Me S5-pentenyl-alanine olefin amino acid connected by an all-carbon crosslinker comprising one double bond
  C-term NH2
LTFAAYWAQLASAA

SEQ ID NO: 125 - protein, 14 aa, Artificial Sequence
  Description of Artificial Sequence: Synthetic peptide
  N-term Ac
  MOD_RES (4)..(4): Alpha-Me R8-octenyl-alanine olefin amino acid connected by an all-carbon crosslinker comprising one double bond
  misc_feature (4)..(11): Crosslink between residues
  MOD_RES (11)..(11): Two pentenyl-alanine olefin side chains, each of which is crosslinked to another amino acid as indicated
  misc_feature (11)..(14): Crosslink between residues
  MOD_RES (14)..(14): Alpha-Me S5-pentenyl-alanine olefin amino acid connected by an all-carbon crosslinker comprising one double bond
  C-term NH2
LTFAAYWEQLASAA

SEQ ID NO: 126 - protein, 14 aa, Artificial Sequence
  Description of Artificial Sequence: Synthetic peptide
  N-term Ac
  MOD_RES (4)..(4): Alpha-Me R8-octenyl-alanine olefin amino acid connected by an all-carbon crosslinker comprising one double bond
  misc_feature (4)..(11): Crosslink between residues
  MOD_RES (11)..(11): Alpha-Me S5-pentenyl-alanine olefin amino acid connected by an all-carbon crosslinker comprising one double bond
  C-term NH2
LTFAAYWAQLASLA

SEQ ID NO: 127 - protein, 14 aa, Artificial Sequence
  Description of Artificial Sequence: Synthetic peptide
  N-term Ac
  MOD_RES (4)..(4): Alpha-Me R8-octenyl-alanine olefin amino acid connected by an all-carbon crosslinker comprising one double bond
  misc_feature (4)..(11): Crosslink between residues
  MOD_RES (11)..(11): Alpha-Me S5-pentenyl-alanine olefin amino acid connected by an all-carbon crosslinker comprising one double bond
  C-term NH2
LTFAAYWAQLASLA

SEQ ID NO: 128 - protein, 14 aa, Artificial Sequence
  Description of Artificial Sequence: Synthetic peptide
  N-term Ac
  MOD_RES (4)..(4): Alpha-Me R8-octenyl-alanine olefin amino acid connected by an all-carbon crosslinker comprising one double bond
  misc_feature (4)..(11): Crosslink between residues
  MOD_RES (11)..(11): Alpha-Me S5-pentenyl-alanine olefin amino acid connected by an all-carbon crosslinker comprising one double bond
  C-term NH2
LTFAAYWAQLASWA

SEQ ID NO: 129 - protein, 14 aa, Artificial Sequence
  Description of Artificial Sequence: Synthetic peptide
  N-term Ac
  MOD_RES (4)..(4): Alpha-Me R8-octenyl-alanine olefin amino acid connected by an all-carbon crosslinker comprising one double bond
  misc_feature (4)..(11): Crosslink between residues
  MOD_RES (11)..(11): Alpha-Me S5-pentenyl-alanine olefin amino acid connected by an all-carbon crosslinker comprising one double bond
  C-term NH2
LTFAAYWAQLASWA

SEQ ID NO: 130 - protein, 14 aa, Artificial Sequence
  Description of Artificial Sequence: Synthetic peptide
  N-term Ac
  MOD_RES (4)..(4): Alpha-Me R8-octenyl-alanine olefin amino acid connected by an all-carbon crosslinker comprising one double bond
  misc_feature (4)..(11): Crosslink between residues
  MOD_RES (11)..(11): Alpha-Me S5-pentenyl-alanine olefin amino acid connected by an all-carbon crosslinker comprising one double bond
  C-term NH2
LTFAAYWAQLASVS

SEQ ID NO: 131 - protein, 14 aa, Artificial Sequence
  Description of Artificial Sequence: Synthetic peptide
  N-term Ac
  MOD_RES (4)..(4): Alpha-Me R8-octenyl-alanine olefin amino acid connected by an all-carbon crosslinker comprising one double bond
  misc_feature (4)..(11): Crosslink between residues
  MOD_RES (11)..(11): Alpha-Me S5-pentenyl-alanine olefin amino acid connected by an all-carbon crosslinker comprising one double bond
  C-term NH2
LTFAAYWAQLASAS

SEQ ID NO: 132 - protein, 14 aa, Artificial Sequence
  Description of Artificial Sequence: Synthetic peptide
  N-term Ac
  MOD_RES (4)..(4): Alpha-Me R8-octenyl-alanine olefin amino acid connected by an all-carbon crosslinker comprising one double bond
  misc_feature (4)..(11): Crosslink between residues
  MOD_RES (11)..(11): Alpha-Me S5-pentenyl-alanine olefin amino acid connected by an all-carbon crosslinker comprising one double bond
  C-term NH2
LTFAAYWAQLASVG

SEQ ID NO: 133 - protein, 14 aa, Artificial Sequence
  Description of Artificial Sequence: Synthetic peptide
  N-term Ac
  MOD_RES (4)..(4): Alpha-Me R8-octenyl-alanine olefin amino acid connected by an all-carbon crosslinker comprising one double bond
  misc_feature (4)..(11): Crosslink between residues
  MOD_RES (11)..(11): Alpha-Me S5-pentenyl-alanine olefin amino acid connected by an all-carbon crosslinker comprising one double bond
  MOD_RES (14)..(14): D-amino acid
  C-term NH2
ETFAVYWAQLASAA

SEQ ID NO: 134 - protein, 14 aa, Artificial Sequence
  Description of Artificial Sequence: Synthetic peptide
  N-term Ac
  MOD_RES (4)..(4): Alpha-Me R8-octenyl-alanine olefin amino acid connected by an all-carbon crosslinker comprising one double bond
  misc_feature (4)..(11): Crosslink between residues
  MOD_RES (11)..(11): Alpha-Me S5-pentenyl-alanine olefin amino acid connected by an all-carbon crosslinker comprising one double bond
  C-term NH2
ETFAVYWAQLASAA

SEQ ID NO: 135 - protein, 14 aa, Artificial Sequence
  Description of Artificial Sequence: Synthetic peptide
  N-term Ac
  MOD_RES (4)..(4): Alpha-Me R8-octenyl-alanine olefin amino acid connected by an all-carbon crosslinker comprising one double bond
  misc_feature (4)..(11): Crosslink between residues
  MOD_RES (11)..(11): Alpha-Me S5-pentenyl-alanine olefin amino acid connected by an all-carbon crosslinker comprising one double bond
  C-term NH2
ETFAVYWAQLASVA

SEQ ID NO: 136 - protein, 14 aa, Artificial Sequence
  Description of Artificial Sequence: Synthetic peptide
  N-term Ac
  MOD_RES (4)..(4): Alpha-Me R8-octenyl-alanine olefin amino acid connected by an all-carbon crosslinker comprising one double bond
  misc_feature (4)..(11): Crosslink between residues
  MOD_RES (11)..(11): Alpha-Me S5-pentenyl-alanine olefin amino acid connected by an all-carbon crosslinker comprising one double bond
  C-term NH2
ETFAVYWAQLASLA

SEQ ID NO: 137 - protein, 14 aa, Artificial Sequence
  Description of Artificial Sequence: Synthetic peptide
  N-term Ac
  MOD_RES (4)..(4): Alpha-Me R8-octenyl-alanine olefin amino acid connected by an all-carbon crosslinker comprising one double bond
  misc_feature (4)..(11): Crosslink between residues
  MOD_RES (11)..(11): Alpha-Me S5-pentenyl-alanine olefin amino acid connected by an all-carbon crosslinker comprising one double bond
  C-term NH2
ETFAVYWAQLASWA

SEQ ID NO: 138 - protein, 14 aa, Artificial Sequence
  Description of Artificial Sequence: Synthetic peptide
  N-term Ac
  MOD_RES (4)..(4): Alpha-Me R8-octenyl-alanine olefin amino acid connected by an all-carbon crosslinker comprising one double bond
  misc_feature (4)..(11): Crosslink between residues
  MOD_RES (11)..(11): Alpha-Me S5-pentenyl-alanine olefin amino acid connected by an all-carbon crosslinker comprising one double bond
  C-term NH2
ETFAKYWAQLASWA

SEQ ID NO: 139 - protein, 14 aa, Artificial Sequence
  Description of Artificial Sequence: Synthetic peptide
  N-term Ac
  MOD_RES (4)..(4): Alpha-Me R8-octenyl-alanine olefin amino acid connected by an all-carbon crosslinker comprising one double bond
  misc_feature (4)..(11): Crosslink between residues
  MOD_RES (11)..(11): Alpha-Me S5-pentenyl-alanine olefin amino acid connected by an all-carbon crosslinker comprising one double bond
  C-term NH2
ETFAVYWAQLASVS

SEQ ID NO: 140 - protein, 14 aa, Artificial Sequence
  Description of Artificial Sequence: Synthetic peptide
  N-term Ac
  MOD_RES (4)..(4): Alpha-Me R8-octenyl-alanine olefin amino acid connected by an all-carbon crosslinker comprising one double bond
  misc_feature (4)..(11): Crosslink between residues
  MOD_RES (11)..(11): Alpha-Me S5-pentenyl-alanine olefin amino acid connected by an all-carbon crosslinker comprising one double bond
  C-term NH2
ETFAVYWAQLASAS

SEQ ID NO: 141 - protein, 14 aa, Artificial Sequence
  Description of Artificial Sequence: Synthetic peptide
  N-term Ac
  MOD_RES (4)..(4): Alpha-Me R8-octenyl-alanine olefin amino acid connected by an all-carbon crosslinker comprising one double bond
  misc_feature (4)..(11): Crosslink between residues
  MOD_RES (11)..(11): Alpha-Me S5-pentenyl-alanine olefin amino acid connected by an all-carbon crosslinker comprising one double bond
  C-term NH2
ETFAVYWAQLASVG

SEQ ID NO: 142 - protein, 14 aa, Artificial Sequence
  Description of Artificial Sequence: Synthetic peptide
  N-term Ac
  MOD_RES (4)..(4): Alpha-Me R8-octenyl-alanine olefin amino acid connected by an all-carbon crosslinker comprising one double bond
  misc_feature (4)..(11): Crosslink between residues
  MOD_RES (11)..(11): Alpha-Me S5-pentenyl-alanine olefin amino acid connected by an all-carbon crosslinker comprising one double bond
  MOD_RES (14)..(14): D-amino acid
  C-term NH2
LTFAVYWAQLASSA

SEQ ID NO: 143 - protein, 14 aa, Artificial Sequence
  Description of Artificial Sequence: Synthetic peptide
  N-term Ac
  MOD_RES (4)..(4): Alpha-Me R8-octenyl-alanine olefin amino acid connected by an all-carbon crosslinker comprising one double bond
  misc_feature (4)..(11): Crosslink between residues
  MOD_RES (11)..(11): Alpha-Me S5-pentenyl-alanine olefin amino acid connected by an all-carbon crosslinker comprising one double bond
  MOD_RES (14)..(14): D-amino acid
  C-term NH2
ETFAVYWAQLASSA

SEQ ID NO: 144 - protein, 14 aa, Artificial Sequence
  Description of Artificial Sequence: Synthetic peptide
  N-term Ac
  MOD_RES (4)..(4): Alpha-Me R8-octenyl-alanine olefin amino acid connected by an all-carbon crosslinker comprising one double bond
  misc_feature (4)..(11): Crosslink between residues
  MOD_RES (11)..(11): Alpha-Me S5-pentenyl-alanine olefin amino acid connected by an all-carbon crosslinker comprising one double bond
  MOD_RES (14)..(14): D-amino acid
  C-term NH2
LTFAVYWAQLASNA

SEQ ID NO: 145 - protein, 14 aa, Artificial Sequence
  Description of Artificial Sequence: Synthetic peptide
  N-term Ac
  MOD_RES (4)..(4): Alpha-Me R8-octenyl-alanine olefin amino acid connected by an all-carbon crosslinker comprising one double bond
  misc_feature (4)..(11): Crosslink between residues
  MOD_RES (11)..(11): Alpha-Me S5-pentenyl-alanine olefin amino acid connected by an all-carbon crosslinker comprising one double bond
  MOD_RES (14)..(14): D-amino acid
  C-term NH2
ETFAVYWAQLASNA

SEQ ID NO: 146 - protein, 14 aa, Artificial Sequence
  Description of Artificial Sequence: Synthetic peptide
  N-term Ac
  MOD_RES (4)..(4): Alpha-Me R8-octenyl-alanine olefin amino acid connected by an all-carbon crosslinker comprising one double bond
  misc_feature (4)..(11): Crosslink between residues
  MOD_RES (11)..(11): Alpha-Me S5-pentenyl-alanine olefin amino acid connected by an all-carbon crosslinker comprising one double bond
  MOD_RES (14)..(14): D-amino acid
  C-term NH2
LTFAVYWAQLASAA

SEQ ID NO: 147 - protein, 14 aa, Artificial Sequence
  Description of Artificial Sequence: Synthetic peptide
  N-term Ac
  MOD_RES (4)..(4): Alpha-Me R8-octenyl-alanine olefin amino acid connected by an all-carbon crosslinker comprising one double bond
  misc_feature (4)..(11): Crosslink between residues
  MOD_RES (11)..(11): Alpha-Me S5-pentenyl-alanine olefin amino acid connected by an all-carbon crosslinker comprising one double bond
  C-term NH2
LTFAVYWAQLASVA

SEQ ID NO: 148 - protein, 14 aa, Artificial Sequence
  Description of Artificial Sequence: Synthetic peptide
  N-term Ac
  MOD_RES (4)..(4): Alpha-Me R8-octenyl-alanine olefin amino acid connected by an all-carbon crosslinker comprising one double bond
  misc_feature (4)..(11): Crosslink between residues
  MOD_RES (11)..(11): Alpha-Me S5-pentenyl-alanine olefin amino acid connected by an all-carbon crosslinker comprising one double bond
  C-term NH2
LTFAVYWAQLASVA

SEQ ID NO: 149 - protein, 14 aa, Artificial Sequence
  Description of Artificial Sequence: Synthetic peptide
  N-term Ac
  MOD_RES (4)..(4): Alpha-Me R8-octenyl-alanine olefin amino acid connected by an all-carbon crosslinker comprising one double bond
  misc_feature (4)..(11): Crosslink between residues
  MOD_RES (11)..(11): Alpha-Me S5-pentenyl-alanine olefin amino acid connected by an all-carbon crosslinker comprising one double bond
  C-term NH2
LTFAVYWAQLASWA

SEQ ID NO: 150 - protein, 14 aa, Artificial Sequence
  Description of Artificial Sequence: Synthetic peptide
  N-term Ac
  MOD_RES (4)..(4): Alpha-Me R8-octenyl-alanine olefin amino acid connected by an all-carbon crosslinker comprising one double bond
  misc_feature (4)..(11): Crosslink between residues
  MOD_RES (11)..(11): Alpha-Me S5-pentenyl-alanine olefin amino acid connected by an all-carbon crosslinker comprising one double bond
  C-term NH2
LTFAVYWAQLASVS

SEQ ID NO: 151 - protein, 14 aa, Artificial Sequence
  Description of Artificial Sequence: Synthetic peptide
  N-term Ac
  MOD_RES (4)..(4): Alpha-Me R8-octenyl-alanine olefin amino acid connected by an all-carbon crosslinker comprising one double bond
  misc_feature (4)..(11): Crosslink between residues
  MOD_RES (11)..(11): Alpha-Me S5-pentenyl-alanine olefin amino acid connected by an all-carbon crosslinker comprising one double bond
  C-term NH2
LTFAVYWAQLASVS

SEQ ID NO: 152 - protein, 14 aa, Artificial Sequence
  Description of Artificial Sequence: Synthetic peptide
  N-term Ac
  MOD_RES (4)..(4): Alpha-Me R8-octenyl-alanine olefin amino acid connected by an all-carbon crosslinker comprising one double bond
  misc_feature (4)..(11): Crosslink between residues
  MOD_RES (11)..(11): Alpha-Me S5-pentenyl-alanine olefin amino acid connected by an all-carbon crosslinker comprising one double bond
  C-term NH2
LTFAVYWAQLASAS

SEQ ID NO: 153 - protein, 14 aa, Artificial Sequence
  Description of Artificial Sequence: Synthetic peptide
  N-term Ac
  MOD_RES (4)..(4): Alpha-Me R8-octenyl-alanine olefin amino acid connected by an all-carbon crosslinker comprising one double bond
  misc_feature (4)..(11): Crosslink between residues
  MOD_RES (11)..(11): Alpha-Me S5-pentenyl-alanine olefin amino acid connected by an all-carbon crosslinker comprising one double bond
  C-term NH2
LTFAVYWAQLASAS

SEQ ID NO: 154 - protein, 14 aa, Artificial Sequence
  Description of Artificial Sequence: Synthetic peptide
  N-term Ac
  MOD_RES (4)..(4): Alpha-Me R8-octenyl-alanine olefin amino acid connected by an all-carbon crosslinker comprising one double bond
  misc_feature (4)..(11): Crosslink between residues
  MOD_RES (11)..(11): Alpha-Me S5-pentenyl-alanine olefin amino acid connected by an all-carbon crosslinker comprising one double bond
  C-term NH2
LTFAVYWAQLASVG

SEQ ID NO: 155 - protein, 14 aa, Artificial Sequence
  Description of Artificial Sequence: Synthetic peptide
  N-term Ac
  MOD_RES (4)..(4): Alpha-Me R8-octenyl-alanine olefin amino acid connected by an all-carbon crosslinker comprising one double bond
  misc_feature (4)..(11): Crosslink between residues
  MOD_RES (11)..(11): Alpha-Me S5-pentenyl-alanine olefin amino acid connected by an all-carbon crosslinker comprising one double bond
  C-term NH2
LTFAVYWAQLASVG

SEQ ID NO: 156 - protein, 14 aa, Artificial Sequence
  Description of Artificial Sequence: Synthetic peptide
  N-term Ac
  MOD_RES (4)..(4): Alpha-Me R8-octenyl-alanine olefin amino acid connected by an all-carbon crosslinker comprising one double bond
  misc_feature (4)..(11): Crosslink between residues
  MOD_RES (10)..(10): Cyclohexyl-Ala
  MOD_RES (11)..(11): Alpha-Me S5-pentenyl-alanine olefin amino acid connected by an all-carbon crosslinker comprising one double bond
  C-term NH2
LTFAEYWAQAASAA

SEQ ID NO: 157 - protein, 14 aa, Artificial Sequence
  Description of Artificial Sequence: Synthetic peptide
  N-term Ac
  MOD_RES (4)..(4): Alpha-Me R8-octenyl-alanine olefin amino acid connected by an all-carbon crosslinker comprising one double bond
  misc_feature (4)..(11): Crosslink between residues
  MOD_RES (10)..(10): Cyclohexyl-Ala
  MOD_RES (11)..(11): Alpha-Me S5-pentenyl-alanine olefin amino acid connected by an all-carbon crosslinker comprising one double bond
  C-term NH2
LTFAEYWAQAASAA

SEQ ID NO: 158 - protein, 14 aa, Artificial Sequence
  Description of Artificial Sequence: Synthetic peptide
  N-term Ac
  MOD_RES (4)..(4): Alpha-Me R8-octenyl-alanine olefin amino acid connected by an all-carbon crosslinker comprising one double bond
  misc_feature (4)..(11): Crosslink between residues
  MOD_RES (10)..(10): Cyclopentyl-Gly
  MOD_RES (11)..(11): Alpha-Me S5-pentenyl-alanine olefin amino acid connected by an all-carbon crosslinker comprising one double bond
  C-term NH2
LTFAEYWAQGASAA

SEQ ID NO: 159 - protein, 14 aa, Artificial Sequence
  Description of Artificial Sequence: Synthetic peptide
  N-term Ac
  MOD_RES (4)..(4): Alpha-Me R8-octenyl-alanine olefin amino acid connected by an all-carbon crosslinker comprising one double bond
  misc_feature (4)..(11): Crosslink between residues
  MOD_RES (10)..(10): Cyclopentyl-Gly
  MOD_RES (11)..(11): Alpha-Me S5-pentenyl-alanine olefin amino acid connected by an all-carbon crosslinker comprising one double bond
  C-term NH2
LTFAEYWAQGASAA

SEQ ID NO: 160 - protein, 14 aa, Artificial Sequence
  Description of Artificial Sequence: Synthetic peptide
  N-term Ac
  MOD_RES (4)..(4): Alpha-Me R8-octenyl-alanine olefin amino acid connected by an all-carbon crosslinker comprising one double bond
  misc_feature (4)..(11): Crosslink between residues
  MOD_RES (11)..(11): Alpha-Me S5-pentenyl-alanine olefin amino acid connected by an all-carbon crosslinker comprising one double bond
  C-term NH2
LTFAEYWAQFASAA

SEQ ID NO: 161 - protein, 14 aa, Artificial Sequence
  Description of Artificial Sequence: Synthetic peptide
  N-term Ac
  MOD_RES (4)..(4): Alpha-Me R8-octenyl-alanine olefin amino acid connected by an all-carbon crosslinker comprising one double bond
  misc_feature (4)..(11): Crosslink between residues
  MOD_RES (11)..(11): Alpha-Me S5-pentenyl-alanine olefin amino acid connected by an all-carbon crosslinker comprising one double bond
  C-term NH2
LTFAEYWAQFASAA

SEQ ID NO: 162 - protein, 14 aa, Artificial Sequence
  Description of Artificial Sequence: Synthetic peptide
  N-term Ac
  MOD_RES (4)..(4): Alpha-Me R8-octenyl-alanine olefin amino acid connected by an all-carbon crosslinker comprising one double bond
  misc_feature (4)..(11): Crosslink between residues
  MOD_RES (10)..(10): Cyclobutyl-Ala
  MOD_RES (11)..(11): Alpha-Me S5-pentenyl-alanine olefin amino acid connected by an all-carbon crosslinker comprising one double bond
  C-term NH2
LTFAEYWAQAASAA

SEQ ID NO: 163 - protein, 14 aa, Artificial Sequence
  Description of Artificial Sequence: Synthetic peptide
  N-term Ac
  MOD_RES (4)..(4): Alpha-Me R8-octenyl-alanine olefin amino acid connected by an all-carbon crosslinker comprising one double bond
  misc_feature (4)..(11): Crosslink between residues
  MOD_RES (10)..(10): Cyclobutyl-Ala
  MOD_RES (11)..(11): Alpha-Me S5-pentenyl-alanine olefin amino acid connected by an all-carbon crosslinker comprising one double bond
  C-term NH2
LTFAEYWAQAASAA

SEQ ID NO: 164 - protein, 14 aa, Artificial Sequence
  Description of Artificial Sequence: Synthetic peptide
  N-term Ac
  MOD_RES (3)..(3): 3-Chloro-Phe
  MOD_RES (4)..(4): Alpha-Me R8-octenyl-alanine olefin amino acid connected by an all-carbon crosslinker comprising one double bond
  misc_feature (4)..(11): Crosslink between residues
  MOD_RES (11)..(11): Alpha-Me S5-pentenyl-alanine olefin amino acid connected by an all-carbon crosslinker comprising one double bond
  C-term NH2
LTFAEYWAQLASAA

SEQ ID NO: 165 - protein, 14 aa, Artificial Sequence
  Description of Artificial Sequence: Synthetic peptide
  N-term Ac
  MOD_RES (3)..(3): 3-Chloro-Phe
  MOD_RES (4)..(4): Alpha-Me R8-octenyl-alanine olefin amino acid connected by an all-carbon crosslinker comprising one double bond
  misc_feature (4)..(11): Crosslink between residues
  MOD_RES (11)..(11): Alpha-Me S5-pentenyl-alanine olefin amino acid connected by an all-carbon crosslinker comprising one double bond
  C-term NH2
LTFAEYWAQLASAA

SEQ ID NO: 166 - protein, 14 aa, Artificial Sequence
  Description of Artificial Sequence: Synthetic peptide
  N-term Ac
  MOD_RES (3)..(3): 3,4-difluoro Phe
  MOD_RES (4)..(4): Alpha-Me R8-octenyl-alanine olefin amino acid connected by an all-carbon crosslinker comprising one double bond
  misc_feature (4)..(11): Crosslink between residues
  MOD_RES (11)..(11): Alpha-Me S5-pentenyl-alanine olefin amino acid connected by an all-carbon crosslinker comprising one double bond
  C-term NH2
LTFAEYWAQLASAA

SEQ ID NO: 167 - protein, 14 aa, Artificial Sequence
  Description of Artificial Sequence: Synthetic peptide
  N-term Ac
  MOD_RES (3)..(3): 3,4-difluoro Phe
  MOD_RES (4)..(4): Alpha-Me R8-octenyl-alanine olefin amino acid connected by an all-carbon crosslinker comprising one double bond
  misc_feature (4)..(11): Crosslink between residues
  MOD_RES (11)..(11): Alpha-Me S5-pentenyl-alanine olefin amino acid connected by an all-carbon crosslinker comprising one double bond
  C-term NH2
LTFAEYWAQLASAA

SEQ ID NO: 168 - protein, 14 aa, Artificial Sequence
  Description of Artificial Sequence: Synthetic peptide
  N-term Ac
  MOD_RES (3)..(3): 3,4-difluoro Phe
  MOD_RES (4)..(4): Alpha-Me R8-octenyl-alanine olefin amino acid connected by an all-carbon crosslinker comprising one double bond
  misc_feature (4)..(11): Crosslink between residues
  MOD_RES (10)..(10): hLeu
  MOD_RES (11)..(11): Alpha-Me S5-pentenyl-alanine olefin amino acid connected by an all-carbon crosslinker comprising one double bond
  C-term NH2
LTFAEYWAQLASAA

SEQ ID NO: 169 - protein, 14 aa, Artificial Sequence
  Description of Artificial Sequence: Synthetic peptide
  N-term Ac
  MOD_RES (3)..(3): 3,4-difluoro Phe
  MOD_RES (4)..(4): Alpha-Me R8-octenyl-alanine olefin amino acid connected by an all-carbon crosslinker comprising one double bond
  misc_feature (4)..(11): Crosslink between residues
  MOD_RES (10)..(10): hLeu
  MOD_RES (11)..(11): Alpha-Me S5-pentenyl-alanine olefin amino acid connected by an all-carbon crosslinker comprising one double bond
  C-term NH2
LTFAEYWAQLASAA

SEQ ID NO: 170 - protein, 14 aa, Artificial Sequence
  Description of Artificial Sequence: Synthetic peptide
  N-term Ac
  MOD_RES (4)..(4): Alpha-Me R8-octenyl-alanine olefin amino acid connected by an all-carbon crosslinker comprising one double bond
  misc_feature (4)..(11): Crosslink between residues
  MOD_RES (11)..(11): Alpha-Me S5-pentenyl-alanine olefin amino acid connected by an all-carbon crosslinker comprising one double bond
  C-term NH2
ETFAEYWAQLASAA

SEQ ID NO: 171 - protein, 14 aa, Artificial Sequence
  Description of Artificial Sequence: Synthetic peptide
  N-term Ac
  MOD_RES (4)..(4): Alpha-Me R8-octenyl-alanine olefin amino acid connected by an all-carbon crosslinker comprising one double bond
  misc_feature (4)..(11): Crosslink between residues
  MOD_RES (11)..(11): Alpha-Me S5-pentenyl-alanine olefin amino acid connected by an all-carbon crosslinker comprising one double bond
  C-term NH2
LTFAAYWVQLASAA

SEQ ID NO: 172 - protein, 14 aa, Artificial Sequence
  Description of Artificial Sequence: Synthetic peptide
  N-term Ac
  MOD_RES (4)..(4): Alpha-Me R8-octenyl-alanine olefin amino acid connected by an all-carbon crosslinker comprising one double bond
  misc_feature (4)..(11): Crosslink between residues
  MOD_RES (11)..(11): Alpha-Me S5-pentenyl-alanine olefin amino acid connected by an all-carbon crosslinker comprising one double bond
  C-term NH2
LTFAAHWAQLASAA

SEQ ID NO: 173 - protein, 14 aa, Artificial Sequence
  Description of Artificial Sequence: Synthetic peptide
  N-term Ac
  MOD_RES (4)..(4): Alpha-Me R8-octenyl-alanine olefin amino acid connected by an all-carbon crosslinker comprising one double bond
  misc_feature (4)..(11): Crosslink between residues
  MOD_RES (11)..(11): Alpha-Me S5-pentenyl-alanine olefin amino acid connected by an all-carbon crosslinker comprising one double bond
  C-term NH2
LTFAAEWAQLASAA

SEQ ID NO: 174 - protein, 14 aa, Artificial Sequence
  Description of Artificial Sequence: Synthetic peptide
  N-term Ac
  MOD_RES (4)..(4): Alpha-Me R8-octenyl-alanine olefin amino acid connected by an all-carbon crosslinker comprising one double bond
  misc_feature (4)..(11): Crosslink between residues
  MOD_RES (11)..(11): Alpha-Me S5-pentenyl-alanine olefin amino acid connected by an all-carbon crosslinker comprising one double bond
  C-term NH2
LTFAASWAQLASAA

SEQ ID NO: 175 - protein, 14 aa, Artificial Sequence
  Description of Artificial Sequence: Synthetic peptide
  N-term Ac
  MOD_RES (4)..(4): Alpha-Me R8-octenyl-alanine olefin amino acid connected by an all-carbon crosslinker comprising one double bond
  misc_feature (4)..(11): Crosslink between residues
  MOD_RES (11)..(11): Alpha-Me S5-pentenyl-alanine olefin amino acid connected by an all-carbon crosslinker comprising one double bond
  C-term NH2
LTFAAEWAQLASAA

SEQ ID NO: 176 - protein, 14 aa, Artificial Sequence
  Description of Artificial Sequence: Synthetic peptide
  N-term Ac
  MOD_RES (4)..(4): Alpha-Me R8-octenyl-alanine olefin amino acid connected by an all-carbon crosslinker comprising one double bond
  misc_feature (4)..(11): Crosslink between residues
  MOD_RES (11)..(11): Alpha-Me S5-pentenyl-alanine olefin amino acid connected by an all-carbon crosslinker comprising one double bond
  C-term NH2
LTFAASWAQLASAA

SEQ ID NO: 177 - protein, 14 aa, Artificial Sequence
  Description of Artificial Sequence: Synthetic peptide
  N-term Ac
  MOD_RES (4)..(4): Alpha-Me R8-octenyl-alanine olefin amino acid connected by an all-carbon crosslinker comprising one double bond
  misc_feature (4)..(11): Crosslink between residues
  MOD_RES (6)..(6): 4-carboxy Phe
  MOD_RES (11)..(11): Alpha-Me S5-pentenyl-alanine olefin amino acid connected by an all-carbon crosslinker comprising one double bond
  C-term NH2
LTFAAFWAQLASAA

SEQ ID NO: 178 - protein, 14 aa, Artificial Sequence
  Description of Artificial Sequence: Synthetic peptide
  N-term Ac
  MOD_RES (4)..(4): Alpha-Me R8-octenyl-alanine olefin amino acid connected by an all-carbon crosslinker comprising one double bond
  misc_feature (4)..(11): Crosslink between residues
  MOD_RES (6)..(6): 4-carboxy Phe
  MOD_RES (11)..(11): Alpha-Me S5-pentenyl-alanine olefin amino acid connected by an all-carbon crosslinker comprising one double bond
  C-term NH2
LTFAAFWAQLASAA

SEQ ID NO: 179 - protein, 15 aa, Artificial Sequence
  Description of Artificial Sequence: Synthetic peptide
  N-term Ac
  MOD_RES (4)..(4): Alpha-Me R8-octenyl-alanine olefin amino acid connected by an all-carbon crosslinker comprising one double bond
  misc_feature (4)..(11): Crosslink between residues
  MOD_RES (11)..(11): Alpha-Me S5-pentenyl-alanine olefin amino acid connected by an all-carbon crosslinker comprising one double bond
  MOD_RES (15)..(15): D-amino acid
  C-term NH2
LTFAAHWAQLAAAIA

SEQ ID NO: 180 - protein, 15 aa, Artificial Sequence
  Description of Artificial Sequence: Synthetic peptide
  N-term Ac
  MOD_RES (4)..(4): Alpha-Me R8-octenyl-alanine olefin amino acid connected by an all-carbon crosslinker comprising one double bond
  misc_feature (4)..(11): Crosslink between residues
  MOD_RES (11)..(11): Alpha-Me S5-pentenyl-alanine olefin amino acid connected by an all-carbon crosslinker comprising one double bond
  MOD_RES (15)..(15): D-amino acid
  C-term NH2
ITFAFYWAQLAAAIA

SEQ ID NO: 181 - protein, 15 aa, Artificial Sequence
  Description of Artificial Sequence: Synthetic peptide
  N-term Ac
  MOD_RES (4)..(4): Alpha-Me R8-octenyl-alanine olefin amino acid connected by an all-carbon crosslinker comprising one double bond
  misc_feature (4)..(11): Crosslink between residues
  MOD_RES (11)..(11): Alpha-Me S5-pentenyl-alanine olefin amino acid connected by an all-carbon crosslinker comprising one double bond
  MOD_RES (15)..(15): D-amino acid
  C-term NH2
ITFAEHWAQLAAAIA

SEQ ID NO: 182 - protein, 15 aa, Artificial Sequence
  Description of Artificial Sequence: Synthetic peptide
  N-term Ac
  MOD_RES (4)..(4): Alpha-Me R8-octenyl-alanine olefin amino acid connected by an all-carbon crosslinker comprising one double bond
  misc_feature (4)..(11): Crosslink between residues
  MOD_RES (11)..(11): Alpha-Me S5-pentenyl-alanine olefin amino acid connected by an all-carbon crosslinker comprising one double bond
  MOD_RES (15)..(15): D-amino acid
  C-term NH2
ITFAEHWAQLAAAIA

SEQ ID NO: 183 - protein, 15 aa, Artificial Sequence
  Description of Artificial Sequence: Synthetic peptide
  N-term Ac
  MOD_RES (4)..(4): Alpha-Me R8-octenyl-alanine olefin amino acid connected by an all-carbon crosslinker comprising one double bond
  misc_feature (4)..(11): Crosslink between residues
  MOD_RES (11)..(11): Alpha-Me S5-pentenyl-alanine olefin amino acid connected by an all-carbon crosslinker comprising one double bond
  MOD_RES (15)..(15): D-amino acid
  C-term NH2
ETFAEHWAQLAAAIA

SEQ ID NO: 184 - protein, 15 aa, Artificial Sequence
  Description of Artificial Sequence: Synthetic peptide
  N-term Ac
  MOD_RES (4)..(4): Alpha-Me R8-octenyl-alanine olefin amino acid connected by an all-carbon crosslinker comprising one double bond
  misc_feature (4)..(11): Crosslink between residues
  MOD_RES (11)..(11): Alpha-Me S5-pentenyl-alanine olefin amino acid connected by an all-carbon crosslinker comprising one double bond
  MOD_RES (15)..(15): D-amino acid
  C-term NH2
ETFAEHWAQLAAAIA

SEQ ID NO: 185 - protein, 15 aa, Artificial Sequence
  Description of Artificial Sequence: Synthetic peptide
  N-term Ac
  MOD_RES (4)..(4): Alpha-Me R8-octenyl-alanine olefin amino acid connected by an all-carbon crosslinker comprising one double bond
  misc_feature (4)..(11): Crosslink between residues
  MOD_RES (11)..(11): Alpha-Me S5-pentenyl-alanine olefin amino acid connected by an all-carbon crosslinker comprising one double bond
  MOD_RES (15)..(15): D-amino acid
  C-term NH2
LTFAAHWVQLAAAIA

SEQ ID NO: 186 - protein, 15 aa, Artificial Sequence
  Description of Artificial Sequence: Synthetic peptide
  N-term Ac
  MOD_RES (4)..(4): Alpha-Me R8-octenyl-alanine olefin amino acid connected by an all-carbon crosslinker comprising one double bond
  misc_feature (4)..(11): Crosslink between residues
  MOD_RES (11)..(11): Alpha-Me S5-pentenyl-alanine olefin amino acid connected by an all-carbon crosslinker comprising one double bond
  MOD_RES (15)..(15): D-amino acid
  C-term NH2
ITFAFYWVQLAAAIA

SEQ ID NO: 187 - protein, 15 aa, Artificial Sequence
  Description of Artificial Sequence: Synthetic peptide
  N-term Ac
  MOD_RES (4)..(4): Alpha-Me R8-octenyl-alanine olefin amino acid connected by an all-carbon crosslinker comprising one double bond
  misc_feature (4)..(11): Crosslink between residues
  MOD_RES (11)..(11): Alpha-Me S5-pentenyl-alanine olefin amino acid connected by an all-carbon crosslinker comprising one double bond
  MOD_RES (15)..(15): D-amino acid
  C-term NH2
ITFAEYWVQLAAAIA

SEQ ID NO: 188 - protein, 15 aa, Artificial Sequence
  Description of Artificial Sequence: Synthetic peptide
  N-term Ac
  MOD_RES (4)..(4): Alpha-Me R8-octenyl-alanine olefin amino acid connected by an all-carbon crosslinker comprising one double bond
  misc_feature (4)..(11): Crosslink between residues
  MOD_RES (11)..(11): Alpha-Me S5-pentenyl-alanine olefin amino acid connected by an all-carbon crosslinker comprising one double bond
  MOD_RES (15)..(15): D-amino acid
  C-term NH2
ITFAEHWVQLAAAIA

SEQ ID NO: 189 - protein, 15 aa, Artificial Sequence
  Description of Artificial Sequence: Synthetic peptide
  N-term Ac
  MOD_RES (4)..(4): Alpha-Me R8-octenyl-alanine olefin amino acid connected by an all-carbon crosslinker comprising one double bond
  misc_feature (4)..(11): Crosslink between residues
  MOD_RES (11)..(11): Alpha-Me S5-pentenyl-alanine olefin amino acid connected by an all-carbon crosslinker comprising one double bond
  MOD_RES (15)..(15): D-amino acid
  C-term NH2
LTFAAEWAQLAAAIA

SEQ ID NO: 190 - protein, 15 aa, Artificial Sequence
  Description of Artificial Sequence: Synthetic peptide
  N-term Ac
  MOD_RES (4)..(4): Alpha-Me R8-octenyl-alanine olefin amino acid connected by an all-carbon crosslinker comprising one double bond
  misc_feature (4)..(11): Crosslink between residues
  MOD_RES (6)..(6): 4-carboxy Phe
  MOD_RES (11)..(11): Alpha-Me S5-pentenyl-alanine olefin amino acid connected by an all-carbon crosslinker comprising one double bond
  MOD_RES (15)..(15): D-amino acid
  C-term NH2
LTFAAFWAQLAAAIA

SEQ ID NO: 191 - protein, 15 aa, Artificial Sequence
  Description of Artificial Sequence: Synthetic peptide
  N-term Ac
  MOD_RES (4)..(4): Alpha-Me R8-octenyl-alanine olefin amino acid connected by an all-carbon crosslinker comprising one double bond
  misc_feature (4)..(11): Crosslink between residues
  MOD_RES (6)..(6): 4-carboxy Phe
  MOD_RES (11)..(11): Alpha-Me S5-pentenyl-alanine olefin amino acid connected by an all-carbon crosslinker comprising one double bond
  MOD_RES (15)..(15): D-amino acid
  C-term NH2
LTFAAFWAQLAAAIA

SEQ ID NO: 192 - protein, 15 aa, Artificial Sequence
  Description of Artificial Sequence: Synthetic peptide
  N-term Ac
  MOD_RES (4)..(4): Alpha-Me R8-octenyl-alanine olefin amino acid connected by an all-carbon crosslinker comprising one double bond
  misc_feature (4)..(11): Crosslink between residues
  MOD_RES (11)..(11): Alpha-Me S5-pentenyl-alanine olefin amino acid connected by an all-carbon crosslinker comprising one double bond
  C-term NH2
LTFAAHWAQLAAHFA

SEQ ID NO: 193 - protein, 15 aa, Artificial Sequence
  Description of Artificial Sequence: Synthetic peptide
  N-term Ac
  MOD_RES (4)..(4): Alpha-Me R8-octenyl-alanine olefin amino acid connected by an all-carbon crosslinker comprising one double bond
  misc_feature (4)..(11): Crosslink between residues
  MOD_RES (11)..(11): Alpha-Me S5-pentenyl-alanine olefin amino acid connected by an all-carbon crosslinker comprising one double bond
  C-term NH2
ITFAFYWAQLAAHFA

SEQ ID NO: 194 - protein, 15 aa, Artificial Sequence
  Description of Artificial Sequence: Synthetic peptide
  N-term Ac
  MOD_RES (4)..(4): Alpha-Me R8-octenyl-alanine olefin amino acid connected by an all-carbon crosslinker comprising one double bond
  misc_feature (4)..(11): Crosslink between residues
  MOD_RES (11)..(11): Alpha-Me S5-pentenyl-alanine olefin amino acid connected by an all-carbon crosslinker comprising one double bond
  C-term NH2
ITFAFYWAQLAAHFA

SEQ ID NO: 195 - protein, 15 aa, Artificial Sequence
  Description of Artificial Sequence: Synthetic peptide
  N-term Ac
  MOD_RES (4)..(4): Alpha-Me R8-octenyl-alanine olefin amino acid connected by an all-carbon crosslinker comprising one double bond
  misc_feature (4)..(11): Crosslink between residues
  MOD_RES (11)..(11): Alpha-Me S5-pentenyl-alanine olefin amino acid connected by an all-carbon crosslinker comprising one double bond
  C-term NH2
ITFAFHWAQLAAEFA

SEQ ID NO: 196 - protein, 15 aa, Artificial Sequence
  Description of Artificial Sequence: Synthetic peptide
  N-term Ac
  MOD_RES (4)..(4): Alpha-Me R8-octenyl-alanine olefin amino acid connected by an all-carbon crosslinker comprising one double bond
  misc_feature (4)..(11): Crosslink between residues
  MOD_RES (11)..(11): Alpha-Me S5-pentenyl-alanine olefin amino acid connected by an all-carbon crosslinker comprising one double bond
  C-term NH2
ITFAFHWAQLAAEFA

SEQ ID NO: 197 - protein, 15 aa, Artificial Sequence
  Description of Artificial Sequence: Synthetic peptide
  N-term Ac
  MOD_RES (4)..(4): Alpha-Me R8-octenyl-alanine olefin amino acid connected by an all-carbon crosslinker comprising one double bond
  misc_feature (4)..(11): Crosslink between residues
  MOD_RES (11)..(11): Alpha-Me S5-pentenyl-alanine olefin amino acid connected by an all-carbon crosslinker comprising one double bond
  C-term NH2
ITFAEHWAQLAAHFA

SEQ ID NO: 198 - protein, 15 aa, Artificial Sequence
  Description of Artificial Sequence: Synthetic peptide
  N-term Ac
  MOD_RES (4)..(4): Alpha-Me R8-octenyl-alanine olefin amino acid connected by an all-carbon crosslinker comprising one double bond
  misc_feature (4)..(11): Crosslink between residues
  MOD_RES (11)..(11): Alpha-Me S5-pentenyl-alanine olefin amino acid connected by an all-carbon crosslinker comprising one double bond
  C-term NH2
ITFAEHWAQLAAHFA

SEQ ID NO: 199 - protein, 15 aa, Artificial Sequence
  Description of Artificial Sequence: Synthetic peptide
  N-term Ac
  MOD_RES (4)..(4): Alpha-Me R8-octenyl-alanine olefin amino acid connected by an all-carbon crosslinker comprising one double bond
  misc_feature (4)..(11): Crosslink between residues
  MOD_RES (11)..(11): Alpha-Me S5-pentenyl-alanine olefin amino acid connected by an all-carbon crosslinker comprising one double bond
  C-term NH2
LTFAAHWVQLAAHFA

SEQ ID NO: 200 - protein, 15 aa, Artificial Sequence
  Description of Artificial Sequence: Synthetic peptide
  N-term Ac
  MOD_RES (4)..(4): Alpha-Me R8-octenyl-alanine olefin amino acid connected by an all-carbon crosslinker comprising one double bond
  misc_feature (4)..(11): Crosslink between residues
  MOD_RES (11)..(11): Alpha-Me S5-pentenyl-alanine olefin amino acid connected by an all-carbon crosslinker comprising one double bond
  C-term NH2
ITFAFYWVQLAAHFA

SEQ ID NO: 201 - protein, 15 aa, Artificial Sequence
  Description of Artificial Sequence: Synthetic peptide
  N-term Ac
  MOD_RES (4)..(4): Alpha-Me R8-octenyl-alanine olefin amino acid connected by an all-carbon crosslinker comprising one double bond
  misc_feature (4)..(11): Crosslink between residues
  MOD_RES (11)..(11): Alpha-Me S5-pentenyl-alanine olefin amino acid connected by an all-carbon crosslinker comprising one double bond
  C-term NH2
ITFAEYWVQLAAHFA

SEQ ID NO: 202 - protein, 15 aa, Artificial Sequence
  Description of Artificial Sequence: Synthetic peptide
  N-term Ac
  MOD_RES (4)..(4): Alpha-Me R8-octenyl-alanine olefin amino acid connected by an all-carbon crosslinker comprising one double bond
  misc_feature (4)..(11): Crosslink between residues
  MOD_RES (11)..(11): Alpha-Me S5-pentenyl-alanine olefin amino acid connected by an all-carbon crosslinker comprising one double bond
  C-term NH2
ITFAEHWVQLAAHFA

SEQ ID NO: 203 - protein, 15 aa, Artificial Sequence
  Description of Artificial Sequence: Synthetic peptide
  N-term Ac
  MOD_RES (4)..(4): Alpha-Me R8-octenyl-alanine olefin amino acid connected by an all-carbon crosslinker comprising one double bond
  misc_feature (4)..(11): Crosslink between residues
  MOD_RES (11)..(11): Alpha-Me S5-pentenyl-alanine olefin amino acid connected by an all-carbon crosslinker comprising one double bond
  C-term NH2
ITFAEHWVQLAAHFA

SEQ ID NO: 204 - protein, 14 aa, Artificial Sequence
  Description of Artificial Sequence: Synthetic peptide
  N-term Ac
  MOD_RES (4)..(4): Alpha-Me R8-octenyl-alanine olefin amino acid connected by an all-carbon crosslinker comprising one double bond
  misc_feature (4)..(11): Crosslink between residues
  MOD_RES (11)..(11): Alpha-Me S5-pentenyl-alanine olefin amino acid connected by an all-carbon crosslinker comprising one double bond
  C-term NH2
ETFAEYWAALASAA

SEQ ID NO: 205 - protein, 14 aa, Artificial Sequence
  Description of Artificial Sequence: Synthetic peptide
  N-term Ac
  MOD_RES (4)..(4): Alpha-Me R8-octenyl-alanine olefin amino acid connected by an all-carbon crosslinker comprising one double bond
  misc_feature (4)..(11): Crosslink between residues
  MOD_RES (11)..(11): Alpha-Me S5-pentenyl-alanine olefin amino acid connected by an all-carbon crosslinker comprising one double bond
  C-term NH2
LTFAAYWVALASAA

SEQ ID NO: 206 - protein, 14 aa, Artificial Sequence
  Description of Artificial Sequence: Synthetic peptide
  N-term Ac
  MOD_RES (4)..(4): Alpha-Me R8-octenyl-alanine olefin amino acid connected by an all-carbon crosslinker comprising one double bond
  misc_feature (4)..(11): Crosslink between residues
  MOD_RES (11)..(11): Alpha-Me S5-pentenyl-alanine olefin amino acid connected by an all-carbon crosslinker comprising one double bond
  C-term NH2
LTFAAHWAALASAA

SEQ ID NO: 207 - protein, 14 aa, Artificial Sequence
  Description of Artificial Sequence: Synthetic peptide
  N-term Ac
  MOD_RES (4)..(4): Alpha-Me R8-octenyl-alanine olefin amino acid connected by an all-carbon crosslinker comprising one double bond
  misc_feature (4)..(11): Crosslink between residues
  MOD_RES (11)..(11): Alpha-Me S5-pentenyl-alanine olefin amino acid connected by an all-carbon crosslinker comprising one double bond
  C-term NH2
LTFAAEWAALASAA

SEQ ID NO: 208 - protein, 14 aa, Artificial Sequence
  Description of Artificial Sequence: Synthetic peptide
  N-term Ac
  MOD_RES (4)..(4): Alpha-Me R8-octenyl-alanine olefin amino acid connected by an all-carbon crosslinker comprising one double bond
  misc_feature (4)..(11): Crosslink between residues
  MOD_RES (11)..(11): Alpha-Me S5-pentenyl-alanine olefin amino acid connected by an all-carbon crosslinker comprising one double bond
  C-term NH2
LTFAAEWAALASAA

SEQ ID NO: 209 - protein, 14 aa, Artificial Sequence
  Description of Artificial Sequence: Synthetic peptide
  N-term Ac
  MOD_RES (4)..(4): Alpha-Me R8-octenyl-alanine olefin amino acid connected by an all-carbon crosslinker comprising one double bond
  misc_feature (4)..(11): Crosslink between residues
  MOD_RES (11)..(11): Alpha-Me S5-pentenyl-alanine olefin amino acid connected by an all-carbon crosslinker comprising one double bond
  C-term NH2
LTFAASWAALASAA

SEQ ID NO: 210 - protein, 14 aa, Artificial Sequence
  Description of Artificial Sequence: Synthetic peptide
  N-term Ac
  MOD_RES (4)..(4): Alpha-Me R8-octenyl-alanine olefin amino acid connected by an all-carbon crosslinker comprising one double bond
  misc_feature (4)..(11): Crosslink between residues
  MOD_RES (11)..(11): Alpha-Me S5-pentenyl-alanine olefin amino acid connected by an all-carbon crosslinker comprising one double bond
  C-term NH2
LTFAASWAALASAA

SEQ ID NO: 211 - protein, 15 aa, Artificial Sequence
  Description of Artificial Sequence: Synthetic peptide
  N-term Ac
  MOD_RES (4)..(4): Alpha-Me R8-octenyl-alanine olefin amino acid connected by an all-carbon crosslinker comprising one double bond
  misc_feature (4)..(11): Crosslink between residues
  MOD_RES (11)..(11): Alpha-Me S5-pentenyl-alanine olefin amino acid connected by an all-carbon crosslinker comprising one double bond
  MOD_RES (15)..(15): D-amino acid
  C-term NH2
LTFAAYWAALAAAIA

SEQ ID NO: 212 - protein, 15 aa, Artificial Sequence
  Description of Artificial Sequence: Synthetic peptide
  N-term Ac
  MOD_RES (4)..(4): Alpha-Me R8-octenyl-alanine olefin amino acid connected by an all-carbon crosslinker comprising one double bond
  misc_feature (4)..(11): Crosslink between residues
  MOD_RES (11)..(11): Alpha-Me S5-pentenyl-alanine olefin amino acid connected by an all-carbon crosslinker comprising one double bond
  MOD_RES (15)..(15): D-amino acid
  C-term NH2
LTFAAYWAALAAAIA

SEQ ID NO: 213 - protein, 15 aa, Artificial Sequence
  Description of Artificial Sequence: Synthetic peptide
  N-term Ac
  MOD_RES (4)..(4): Alpha-Me R8-octenyl-alanine olefin amino acid connected by an all-carbon crosslinker comprising one double bond
  misc_feature (4)..(11): Crosslink between residues
  MOD_RES (11)..(11): Alpha-Me S5-pentenyl-alanine olefin amino acid connected by an all-carbon crosslinker comprising one double bond
  C-term NH2
LTFAAYWAALAAHFA

SEQ ID NO: 214 - protein, 15 aa, Artificial Sequence
  Description of Artificial Sequence: Synthetic peptide
  N-term Ac
  MOD_RES (4)..(4): Alpha-Me R8-octenyl-alanine olefin amino acid connected by an all-carbon crosslinker comprising one double bond
  misc_feature (4)..(11): Crosslink between residues
  MOD_RES (11)..(11): Alpha-Me S5-pentenyl-alanine olefin amino acid connected by an all-carbon crosslinker comprising one double bond
  MOD_RES (15)..(15): D-amino acid
  C-term NH2
LTFAEHWAQLAAHIA

SEQ ID NO: 215 - protein, 15 aa, Artificial Sequence
  Description of Artificial Sequence: Synthetic peptide
  N-term Ac
  MOD_RES (4)..(4): Alpha-Me R8-octenyl-alanine olefin amino acid connected by an all-carbon crosslinker comprising one double bond
  misc_feature (4)..(11): Crosslink between residues
  MOD_RES (11)..(11): Alpha-Me S5-pentenyl-alanine olefin amino acid connected by an all-carbon crosslinker comprising one double bond
  MOD_RES (15)..(15): D-amino acid
  C-term NH2
LTFAEHWAQLAAHIA

SEQ ID NO: 216 - protein, 15 aa, Artificial Sequence
  Description of Artificial Sequence: Synthetic peptide
  N-term Ac
  MOD_RES (4)..(4): Alpha-Me R8-octenyl-alanine olefin amino acid connected by an all-carbon crosslinker comprising one double bond
  misc_feature (4)..(11): Crosslink between residues
  MOD_RES (11)..(11): Alpha-Me S5-pentenyl-alanine olefin amino acid connected by an all-carbon crosslinker comprising one double bond
  MOD_RES (15)..(15): D-amino acid
  C-term NH2
LTFAAHWAQLAAHIA

SEQ ID NO: 217 - protein, 15 aa, Artificial Sequence
  Description of Artificial Sequence: Synthetic peptide
  N-term Ac
  MOD_RES (4)..(4): Alpha-Me R8-octenyl-alanine olefin amino acid connected by an all-carbon crosslinker comprising one double bond
  misc_feature (4)..(11): Crosslink between residues
  MOD_RES (11)..(11): Alpha-Me S5-pentenyl-alanine olefin amino acid connected by an all-carbon crosslinker comprising one double bond
  MOD_RES (15)..(15): D-amino acid
  C-term NH2
LTFAEYWAQLAAHIA

SEQ ID NO: 218 - protein, 15 aa, Artificial Sequence
  Description of Artificial Sequence: Synthetic peptide
  N-term Ac
  MOD_RES (4)..(4): Alpha-Me R8-octenyl-alanine olefin amino acid connected by an all-carbon crosslinker comprising one double bond
  misc_feature (4)..(11): Crosslink between residues
  MOD_RES (11)..(11): Alpha-Me S5-pentenyl-alanine olefin amino acid connected by an all-carbon crosslinker comprising one double bond
  MOD_RES (15)..(15): D-amino acid
  C-term NH2
LTFAAYWAQLAAAFA

SEQ ID NO: 219 - protein, 15 aa, Artificial Sequence
  Description of Artificial Sequence: Synthetic peptide
  N-term Ac
  MOD_RES (4)..(4): Alpha-Me R8-octenyl-alanine olefin amino acid connected by an all-carbon crosslinker comprising one double bond
  misc_feature (4)..(11): Crosslink between residues
  MOD_RES (11)..(11): Alpha-Me S5-pentenyl-alanine olefin amino acid connected by an all-carbon crosslinker comprising one double bond
  MOD_RES (15)..(15): D-amino acid
  C-term NH2
LTFAAYWAQLAAAFA

SEQ ID NO: 220 - protein, 15 aa, Artificial Sequence
  Description of Artificial Sequence: Synthetic peptide
  N-term Ac
  MOD_RES (4)..(4): Alpha-Me R8-octenyl-alanine olefin amino acid connected by an all-carbon crosslinker comprising one double bond
  misc_feature (4)..(11): Crosslink between residues
  MOD_RES (11)..(11): Alpha-Me S5-pentenyl-alanine olefin amino acid connected by an all-carbon crosslinker comprising one double bond
  MOD_RES (15)..(15): D-amino acid
  C-term NH2
LTFAAYWAQLAAAWA

SEQ ID NO: 221 - protein, 15 aa, Artificial Sequence
  Description of Artificial Sequence: Synthetic peptide
  N-term Ac
  MOD_RES (4)..(4): Alpha-Me R8-octenyl-alanine olefin amino acid connected by an all-carbon crosslinker comprising one double bond
  misc_feature (4)..(11): Crosslink between residues
  MOD_RES (11)..(11): Alpha-Me S5-pentenyl-alanine olefin amino acid connected by an all-carbon crosslinker comprising one double bond
  MOD_RES (15)..(15): D-amino acid
  C-term NH2
LTFAAYWAQLAAAVA

SEQ ID NO: 222 - protein, 15 aa, Artificial Sequence
  Description of Artificial Sequence: Synthetic peptide
  N-term Ac
  MOD_RES (4)..(4): Alpha-Me R8-octenyl-alanine olefin amino acid connected by an all-carbon crosslinker comprising one double bond
  misc_feature (4)..(11): Crosslink between residues
  MOD_RES (11)..(11): Alpha-Me S5-pentenyl-alanine olefin amino acid connected by an all-carbon crosslinker comprising one double bond
  MOD_RES (15)..(15): D-amino acid
  C-term NH2
LTFAAYWAQLAAAVA

SEQ ID NO: 223 - protein, 15 aa, Artificial Sequence
  Description of Artificial Sequence: Synthetic peptide
  N-term Ac
  MOD_RES (4)..(4): Alpha-Me R8-octenyl-alanine olefin amino acid connected by an all-carbon crosslinker comprising one double bond
  misc_feature (4)..(11): Crosslink between residues
  MOD_RES (11)..(11): Alpha-Me S5-pentenyl-alanine olefin amino acid connected by an all-carbon crosslinker comprising one double bond
  MOD_RES (15)..(15): D-amino acid
  C-term NH2
LTFAAYWAQLAAALA

SEQ ID NO: 224 - protein, 15 aa, Artificial Sequence
  Description of Artificial Sequence: Synthetic peptide
  N-term Ac
  MOD_RES (4)..(4): Alpha-Me R8-octenyl-alanine olefin amino acid connected by an all-carbon crosslinker comprising one double bond
  misc_feature (4)..(11): Crosslink between residues
  MOD_RES (11)..(11): Alpha-Me S5-pentenyl-alanine olefin amino acid connected by an all-carbon crosslinker comprising one double bond
  MOD_RES (15)..(15): D-amino acid
  C-term NH2
LTFAAYWAQLAAALA

SEQ ID NO: 225 - protein, 15 aa, Artificial Sequence
  Description of Artificial Sequence: Synthetic peptide
  N-term Ac
  MOD_RES (4)..(4): Alpha-Me R8-octenyl-alanine olefin amino acid connected by an all-carbon crosslinker comprising one double bond
  misc_feature (4)..(11): Crosslink between residues
  MOD_RES (11)..(11): Alpha-Me S5-pentenyl-alanine olefin amino acid connected by an all-carbon crosslinker comprising one double bond
  MOD_RES (15)..(15): D-amino acid
  C-term NH2
LTFAEYWAQLAAAIA

SEQ ID NO: 226 - protein, 15 aa, Artificial Sequence
  Description of Artificial Sequence: Synthetic peptide
  N-term Ac
  MOD_RES (4)..(4): Alpha-Me R8-octenyl-alanine olefin amino acid connected by an all-carbon crosslinker comprising one double bond
  misc_feature (4)..(11): Crosslink between residues
  MOD_RES (11)..(11): Alpha-Me S5-pentenyl-alanine olefin amino acid connected by an all-carbon crosslinker comprising one double bond
  MOD_RES (15)..(15): D-amino acid
  C-term NH2
LTFAEYWAQLAAAIA

SEQ ID NO: 227 - protein, 15 aa, Artificial Sequence
  Description of Artificial Sequence: Synthetic peptide
  N-term Ac
  MOD_RES (4)..(4): Alpha-Me R8-octenyl-alanine olefin amino acid connected by an all-carbon crosslinker comprising one double bond
  misc_feature (4)..(11): Crosslink between residues
  MOD_RES (11)..(11): Alpha-Me S5-pentenyl-alanine olefin amino acid connected by an all-carbon crosslinker comprising one double bond
  MOD_RES (15)..(15): D-amino acid
  C-term NH2
LTFAEYWAQLAAAFA

SEQ ID NO: 228 - protein, 15 aa, Artificial Sequence
  Description of Artificial Sequence: Synthetic peptide
  N-term Ac
  MOD_RES (4)..(4): Alpha-Me R8-octenyl-alanine olefin amino acid connected by an all-carbon crosslinker comprising one double bond
  misc_feature (4)..(11): Crosslink between residues
  MOD_RES (11)..(11): Alpha-Me S5-pentenyl-alanine olefin amino acid connected by an all-carbon crosslinker comprising one double bond
  MOD_RES (15)..(15): D-amino acid
  C-term NH2
LTFAEYWAQLAAAFA

SEQ ID NO: 229 - protein, 15 aa, Artificial Sequence
  Description of Artificial Sequence: Synthetic peptide
  N-term Ac
  MOD_RES (4)..(4): Alpha-Me R8-octenyl-alanine olefin amino acid connected by an all-carbon crosslinker comprising one double bond
  misc_feature (4)..(11): Crosslink between residues
  MOD_RES (11)..(11): Alpha-Me S5-pentenyl-alanine olefin amino acid connected by an all-carbon crosslinker comprising one double bond
  MOD_RES (15)..(15): D-amino acid
  C-term NH2
LTFAEYWAQLAAAVA

SEQ ID NO: 230 - protein, 15 aa, Artificial Sequence
  Description of Artificial Sequence: Synthetic peptide
  N-term Ac
  MOD_RES (4)..(4): Alpha-Me R8-octenyl-alanine olefin amino acid connected by an all-carbon crosslinker comprising one double bond
  misc_feature (4)..(11): Crosslink between residues
  MOD_RES (11)..(11): Alpha-Me S5-pentenyl-alanine olefin amino acid connected by an all-carbon crosslinker comprising one double bond
  MOD_RES (15)..(15): D-amino acid
  C-term NH2
LTFAEYWAQLAAAVA

SEQ ID NO: 231 - protein, 15 aa, Artificial Sequence
  Description of Artificial Sequence: Synthetic peptide
  N-term Ac
  MOD_RES (4)..(4): Alpha-Me R8-octenyl-alanine olefin amino acid connected by an all-carbon crosslinker comprising one double bond
  misc_feature (4)..(11): Crosslink between residues
  MOD_RES (11)..(11): Alpha-Me S5-pentenyl-alanine olefin amino acid connected by an all-carbon crosslinker comprising one double bond
  MOD_RES (15)..(15): D-amino acid
  C-term NH2
LTFAEHWAQLAAAIA

SEQ ID NO: 232 - protein, 15 aa, Artificial Sequence
  Description of Artificial Sequence: Synthetic peptide
  N-term Ac
  MOD_RES (4)..(4): Alpha-Me R8-octenyl-alanine olefin amino acid connected by an all-carbon crosslinker comprising one double bond
  misc_feature (4)..(11): Crosslink between residues
  MOD_RES (11)..(11): Alpha-Me S5-pentenyl-alanine olefin amino acid connected by an all-carbon crosslinker comprising one double bond
  MOD_RES (15)..(15): D-amino acid
  C-term NH2
LTFAEHWAQLAAAIA

SEQ ID NO: 233 - protein, 15 aa, Artificial Sequence
  Description of Artificial Sequence: Synthetic peptide
  N-term Ac
  MOD_RES (4)..(4): Alpha-Me R8-octenyl-alanine olefin amino acid connected by an all-carbon crosslinker comprising one double bond
  misc_feature (4)..(11): Crosslink between residues
  MOD_RES (11)..(11): Alpha-Me S5-pentenyl-alanine olefin amino acid connected by an all-carbon crosslinker comprising one double bond
  MOD_RES (15)..(15): D-amino acid
  C-term NH2
LTFAEHWAQLAAAWA

SEQ ID NO: 234 - protein, 15 aa, Artificial Sequence
  Description of Artificial Sequence: Synthetic peptide
  N-term Ac
  MOD_RES (4)..(4): Alpha-Me R8-octenyl-alanine olefin amino acid connected by an all-carbon crosslinker comprising one double bond
  misc_feature (4)..(11): Crosslink between residues
  MOD_RES (11)..(11): Alpha-Me S5-pentenyl-alanine olefin amino acid connected by an all-carbon crosslinker comprising one double bond
  MOD_RES (15)..(15): D-amino acid
  C-term NH2
LTFAEHWAQLAAAWA

SEQ ID NO: 235 - protein, 15 aa, Artificial Sequence
  Description of Artificial Sequence: Synthetic peptide
  N-term Ac
  MOD_RES (4)..(4): Alpha-Me R8-octenyl-alanine olefin amino acid connected by an all-carbon crosslinker comprising one double bond
  misc_feature (4)..(11): Crosslink between residues
  MOD_RES (11)..(11): Alpha-Me S5-pentenyl-alanine olefin amino acid connected by an all-carbon crosslinker comprising one double bond
  MOD_RES (15)..(15): D-amino acid
  C-term NH2
LTFAEHWAQLAAALA

SEQ ID NO: 236 - protein, 15 aa, Artificial Sequence
  Description of Artificial Sequence: Synthetic peptide
  N-term Ac
  MOD_RES (4)..(4): Alpha-Me R8-octenyl-alanine olefin amino acid connected by an all-carbon crosslinker comprising one double bond
  misc_feature (4)..(11): Crosslink between residues
  MOD_RES (11)..(11): Alpha-Me S5-pentenyl-alanine olefin amino acid connected by an all-carbon crosslinker comprising one double bond
  MOD_RES (15)..(15): D-amino acid
  C-term NH2
LTFAEHWAQLAAALA

SEQ ID NO: 237 - protein, 15 aa, Artificial Sequence
  Description of Artificial Sequence: Synthetic peptide
  N-term Ac
  MOD_RES (4)..(4): Alpha-Me R8-octenyl-alanine olefin amino acid connected by an all-carbon crosslinker comprising one double bond
  misc_feature (4)..(11): Crosslink between residues
  MOD_RES (11)..(11): Alpha-Me S5-pentenyl-alanine olefin amino acid connected by an all-carbon crosslinker comprising one double bond
  MOD_RES (15)..(15): D-amino acid
  C-term NH2
ETFAEHWVQLAAALA

SEQ ID NO: 238 - protein, 15 aa, Artificial Sequence
  Description of Artificial Sequence: Synthetic peptide
  N-term Ac
  MOD_RES (4)..(4): Alpha-Me R8-octenyl-alanine olefin amino acid connected by an all-carbon crosslinker comprising one double bond
  misc_feature (4)..(11): Crosslink between residues
  MOD_RES (11)..(11): Alpha-Me S5-pentenyl-alanine olefin amino acid connected by an all-carbon crosslinker comprising one double bond
  MOD_RES (15)..(15): D-amino acid
  C-term NH2
LTFAAYWAQLAAAAA

SEQ ID NO: 239 - protein, 15 aa, Artificial Sequence
  Description of Artificial Sequence: Synthetic peptide
  N-term Ac
  MOD_RES (4)..(4): Alpha-Me R8-octenyl-alanine olefin amino acid connected by an all-carbon crosslinker comprising one double bond
  misc_feature (4)..(11): Crosslink between residues
  MOD_RES (11)..(11): Alpha-Me S5-pentenyl-alanine olefin amino acid connected by an all-carbon crosslinker comprising one double bond
  MOD_RES (15)..(15): D-amino acid
  C-term NH2
LTFAAYWAQLAAAAA

SEQ ID NO: 240 - protein, 15 aa, Artificial Sequence
  Description of Artificial Sequence: Synthetic peptide
  N-term Ac
  MOD_RES (4)..(4): Alpha-Me R8-octenyl-alanine olefin amino acid connected by an all-carbon crosslinker comprising one double bond
  misc_feature (4)..(11): Crosslink between residues
  MOD_RES (11)..(11): Alpha-Me S5-pentenyl-alanine olefin amino acid connected by an all-carbon crosslinker comprising one double bond
  MOD_RES (14)..(14): 2-aminoisobutyric acid
  C-term NH2
LTFAAYWAQLAAAXA

SEQ ID NO: 241 - protein, 15 aa, Artificial Sequence
  Description of Artificial Sequence: Synthetic peptide
  N-term Ac
  MOD_RES (4)..(4): Alpha-Me R8-octenyl-alanine olefin amino acid connected by an all-carbon crosslinker comprising one double bond
  misc_feature (4)..(11): Crosslink between residues
  MOD_RES (11)..(11): Alpha-Me S5-pentenyl-alanine olefin amino acid connected by an all-carbon crosslinker comprising one double bond
  MOD_RES (14)..(14): 2-aminoisobutyric acid
  C-term NH2
LTFAAYWAQLAAAXA

SEQ ID NO: 242 - protein, 16 aa, Artificial Sequence
  Description of Artificial Sequence: Synthetic peptide
  N-term Ac
  MOD_RES (4)..(4): Alpha-Me R8-octenyl-alanine olefin amino acid connected by an all-carbon crosslinker comprising one double bond
  misc_feature (4)..(11): Crosslink between residues
  MOD_RES (11)..(11): Alpha-Me S5-pentenyl-alanine olefin amino acid connected by an all-carbon crosslinker comprising one double bond
  MOD_RES (16)..(16): D-amino acid
  C-term NH2
LTFAAYWAQLAAAAAA

SEQ ID NO: 243 - protein, 15 aa, Artificial Sequence
  Description of Artificial Sequence: Synthetic peptide
  N-term Ac
  MOD_RES (4)..(4): Alpha-Me R5-pentenyl-alanine olefin amino acid connected by an all-carbon crosslinker comprising one double bond
  misc_feature (4)..(11): Crosslink between residues
  MOD_RES (11)..(11): Alpha-Me S8-octenyl-alanine olefin amino acid connected by an all-carbon crosslinker comprising one double bond
  MOD_RES (15)..(15): D-amino acid
  C-term NH2
LTFAAYWAQLAAAIA

SEQ ID NO: 244 - protein, 14 aa, Artificial Sequence
  Description of Artificial Sequence: Synthetic peptide
  N-term Ac
  MOD_RES (4)..(4): Alpha-Me R5-pentenyl-alanine olefin amino acid connected by an all-carbon crosslinker comprising one double bond
  misc_feature (4)..(11): Crosslink between residues
  MOD_RES (11)..(11): Alpha-Me S8-octenyl-alanine olefin amino acid connected by an all-carbon crosslinker comprising one double bond
  C-term NH2
LTFAAYWAQLASAA

SEQ ID NO: 245 - protein, 15 aa, Artificial Sequence
  Description of Artificial Sequence: Synthetic peptide
  N-term Ac
  MOD_RES (4)..(4): Alpha-Me R8-octenyl-alanine olefin amino acid connected by an all-carbon crosslinker comprising one double bond
  misc_feature (4)..(11): Crosslink between residues
  MOD_RES (10)..(10): Cyclobutyl-Ala
  MOD_RES (11)..(11): Alpha-Me S5-pentenyl-alanine olefin amino acid connected by an all-carbon crosslinker comprising one double bond
  MOD_RES (14)..(14): Norleucine
  C-term NH2
LTFAAYWAQAAAALA

SEQ ID NO: 246 - protein, 15 aa, Artificial Sequence
  Description of Artificial Sequence: Synthetic peptide
  N-term Ac
  MOD_RES (4)..(4): Alpha-Me R8-octenyl-alanine olefin amino acid connected by an all-carbon crosslinker comprising one double bond
  misc_feature (4)..(11): Crosslink between residues
  MOD_RES (10)..(10): Cyclobutyl-Ala
  MOD_RES (11)..(11): Alpha-Me S5-pentenyl-alanine olefin amino acid connected by an all-carbon crosslinker comprising one double bond
  MOD_RES (14)..(14): Norleucine
  C-term NH2
ETFAAYWAQAAAALA

SEQ ID NO: 247 - protein, 15 aa, Artificial Sequence
  Description of Artificial Sequence: Synthetic peptide
  N-term Ac
  MOD_RES (4)..(4): Alpha-Me R8-octenyl-alanine olefin amino acid connected by an all-carbon crosslinker comprising one double bond
  misc_feature (4)..(11): Crosslink between residues
  MOD_RES (10)..(10): Cyclobutyl-Ala
  MOD_RES (11)..(11): Alpha-Me S5-pentenyl-alanine olefin amino acid connected by an all-carbon crosslinker comprising one double bond
  MOD_RES (14)..(14): Norleucine
  C-term NH2
LTFAEYWAQAAAALA

SEQ ID NO: 248 - protein, 15 aa, Artificial Sequence
  Description of Artificial Sequence: Synthetic peptide
  N-term Ac
  MOD_RES (4)..(4): Alpha-Me R8-octenyl-alanine olefin amino acid connected by an all-carbon crosslinker comprising one double bond
  misc_feature (4)..(11): Crosslink between residues
  MOD_RES (10)..(10): Cyclobutyl-Ala
  MOD_RES (11)..(11): Alpha-Me S5-pentenyl-alanine olefin amino acid connected by an all-carbon crosslinker comprising one double bond
  MOD_RES (14)..(14): Norleucine
  C-term NH2
LTFAAYWAQAAAWLA

SEQ ID NO: 249 - protein, 15 aa, Artificial Sequence
  Description of Artificial Sequence: Synthetic peptide
  N-term Ac
  MOD_RES (4)..(4): Alpha-Me R8-octenyl-alanine olefin amino acid connected by an all-carbon crosslinker comprising one double bond
  misc_feature (4)..(11): Crosslink between residues
  MOD_RES (10)..(10): Cyclobutyl-Ala
  MOD_RES (11)..(11): Alpha-Me S5-pentenyl-alanine olefin amino acid connected by an all-carbon crosslinker comprising one double bond
  MOD_RES (14)..(14): Norleucine
  C-term NH2
ETFAAYWAQAAAWLA

SEQ ID NO: 250 - protein, 15 aa, Artificial Sequence
  Description of Artificial Sequence: Synthetic peptide
  N-term Ac
  MOD_RES (4)..(4): Alpha-Me R8-octenyl-alanine olefin amino acid connected by an all-carbon crosslinker comprising one double bond
  misc_feature (4)..(11): Crosslink between residues
  MOD_RES (10)..(10): Cyclobutyl-Ala
  MOD_RES (11)..(11): Alpha-Me S5-pentenyl-alanine olefin amino acid connected by an all-carbon crosslinker comprising one double bond
  MOD_RES (14)..(14): Norleucine
  C-term NH2
LTFAEYWAQAAAWLA

SEQ ID NO: 251 - protein, 15 aa, Artificial Sequence
  Description of Artificial Sequence: Synthetic peptide
  N-term Ac
  MOD_RES (4)..(4): Alpha-Me R8-octenyl-alanine olefin amino acid connected by an all-carbon crosslinker comprising one double bond
  misc_feature (4)..(11): Crosslink between residues
  MOD_RES (10)..(10): Cyclobutyl-Ala
  MOD_RES (11)..(11): Alpha-Me S5-pentenyl-alanine olefin amino acid connected by an all-carbon crosslinker comprising one double bond
  C-term NH2
LTFAEYWAQAASAFA

SEQ ID NO: 252 - protein, 15 aa, Artificial Sequence
  Description of Artificial Sequence: Synthetic peptide
  N-term Ac
  MOD_RES (3)..(3): 3,4-difluoro Phe
  MOD_RES (4)..(4): Alpha-Me R8-octenyl-alanine olefin amino acid connected by an all-carbon crosslinker comprising one double bond
  misc_feature (4)..(11): Crosslink between residues
  MOD_RES (10)..(10): Cyclobutyl-Ala
  MOD_RES (11)..(11): Alpha-Me S5-pentenyl-alanine olefin amino acid connected by an all-carbon crosslinker comprising one double bond
  MOD_RES (14)..(14): Norleucine
  C-term NH2
LTFAEYWAQAASALA

SEQ ID NO: 253 - protein, 15 aa, Artificial Sequence
  Description of Artificial Sequence: Synthetic peptide
  N-term Ac
  MOD_RES (4)..(4): Alpha-Me R8-octenyl-alanine olefin amino acid connected by an all-carbon crosslinker comprising one double bond
  misc_feature (4)..(11): Crosslink between residues
  MOD_RES (6)..(6): 4-carboxy Phe
  MOD_RES (10)..(10): Cyclobutyl-Ala
  MOD_RES (11)..(11): Alpha-Me S5-pentenyl-alanine olefin amino acid connected by an all-carbon crosslinker comprising one double bond
  MOD_RES (14)..(14): Norleucine
  C-term NH2
LTFAEFWAQAASALA

SEQ ID NO: 254 - protein, 15 aa, Artificial Sequence
  Description of Artificial Sequence: Synthetic peptide
  N-term Ac
  MOD_RES (4)..(4): Alpha-Me R8-octenyl-alanine olefin amino acid connected by an all-carbon crosslinker comprising one double bond
  misc_feature (4)..(11): Crosslink between residues
  MOD_RES (10)..(10): Cyclobutyl-Ala
  MOD_RES (11)..(11): Alpha-Me S5-pentenyl-alanine olefin amino acid connected by an all-carbon crosslinker comprising one double bond
  MOD_RES (14)..(14): Norleucine
  C-term NH2
LTFAEYWSQAASALA

SEQ ID NO: 255 - protein, 15 aa, Artificial Sequence
  Description of Artificial Sequence: Synthetic peptide
  N-term Ac
  MOD_RES (4)..(4): Alpha-Me R8-octenyl-alanine olefin amino acid connected by an all-carbon crosslinker comprising one double bond
  misc_feature (4)..(11): Crosslink between residues
  MOD_RES (10)..(10): Cyclobutyl-Ala
  MOD_RES (11)..(11): Alpha-Me S5-pentenyl-alanine olefin amino acid connected by an all-carbon crosslinker comprising one double bond
  MOD_RES (14)..(14): Norleucine
  C-term NH2
LTFAEYWWQAASALA

SEQ ID NO: 256 - protein, 15 aa, Artificial Sequence
  Description of Artificial Sequence: Synthetic peptide
  N-term Ac
  MOD_RES (4)..(4): Alpha-Me R8-octenyl-alanine olefin amino acid connected by an all-carbon crosslinker comprising one double bond
  misc_feature (4)..(11): Crosslink between residues
  MOD_RES (10)..(10): Cyclobutyl-Ala
  MOD_RES (11)..(11): Alpha-Me S5-pentenyl-alanine olefin amino acid connected by an all-carbon crosslinker comprising one double bond
  MOD_RES (15)..(15): D-amino acid
  C-term NH2
LTFAEYWAQAAAAIA

SEQ ID NO: 257 - protein, 15 aa, Artificial Sequence
  Description of Artificial Sequence: Synthetic peptide
  N-term Ac
  MOD_RES (3)..(3): 3,4-difluoro Phe
  MOD_RES (4)..(4): Alpha-Me R8-octenyl-alanine olefin amino acid connected by an all-carbon crosslinker comprising one double bond
  misc_feature (4)..(11): Crosslink between residues
  MOD_RES (10)..(10): Cyclobutyl-Ala
  MOD_RES (11)..(11): Alpha-Me S5-pentenyl-alanine olefin amino acid connected by an all-carbon crosslinker comprising one double bond
  MOD_RES (15)..(15): D-amino acid
  C-term NH2
LTFAEYWAQAAAAIA

SEQ ID NO: 258 - protein, 15 aa, Artificial Sequence
  Description of Artificial Sequence: Synthetic peptide
  N-term Ac
  MOD_RES (4)..(4): Alpha-Me R8-octenyl-alanine olefin amino acid connected by an all-carbon crosslinker comprising one double bond
  misc_feature (4)..(11): Crosslink between residues
  MOD_RES (6)..(6): 4-carboxy Phe
  MOD_RES (10)..(10): Cyclobutyl-Ala
  MOD_RES (11)..(11): Alpha-Me S5-pentenyl-alanine olefin amino acid connected by an all-carbon crosslinker comprising one double bond
  MOD_RES (15)..(15): D-amino acid
  C-term NH2
LTFAEFWAQAAAAIA

SEQ ID NO: 259 - protein, 14 aa, Artificial Sequence
  Description of Artificial Sequence: Synthetic peptide
  N-term Pam
  MOD_RES (4)..(4): Alpha-Me R8-octenyl-alanine olefin amino acid connected by an all-carbon crosslinker comprising one double bond
  misc_feature (4)..(11): Crosslink between residues
  MOD_RES (10)..(10): Cyclobutyl-Ala
  MOD_RES (11)..(11): Alpha-Me S5-pentenyl-alanine olefin amino acid connected by an all-carbon crosslinker comprising one double bond
  C-term NH2
ETFAEYWAQAASAA

SEQ ID NO: 260 - protein, 14 aa, Artificial Sequence
  Description of Artificial Sequence: Synthetic peptide
  N-term Ac
  MOD_RES (3)..(3): homo-Phe
  MOD_RES (4)..(4): Alpha-Me R8-octenyl-alanine olefin amino acid connected by an all-carbon crosslinker comprising one double bond
  misc_feature (4)..(11): Crosslink between residues
  MOD_RES (10)..(10): Cyclobutyl-Ala
  MOD_RES (11)..(11): Alpha-Me S5-pentenyl-alanine olefin amino acid connected by an all-carbon crosslinker comprising one double bond
  C-term NH2
LTFAEFWAQAASAA

SEQ ID NO: 261 - protein, 14 aa, Artificial Sequence
  Description of Artificial Sequence: Synthetic peptide
  N-term Ac
  MOD_RES (4)..(4): Alpha-Me R8-octenyl-alanine olefin amino acid connected by an all-carbon crosslinker comprising one double bond
  misc_feature (4)..(11): Crosslink between residues
  MOD_RES (10)..(10): Cyclobutyl-Ala
  MOD_RES (11)..(11): Alpha-Me S5-pentenyl-alanine olefin amino acid connected by an all-carbon crosslinker comprising one double bond
  C-term NH2
LTAAEYWAQAASAA

SEQ ID NO: 262 - protein, 14 aa, Artificial Sequence
  Description of Artificial Sequence: Synthetic peptide
  N-term Ac
  MOD_RES (4)..(4): Alpha-Me R8-octenyl-alanine olefin amino acid connected by an all-carbon crosslinker comprising one double bond
  misc_feature (4)..(11): Crosslink between residues
  MOD_RES (10)..(10): Cyclobutyl-Ala
  MOD_RES (11)..(11): Alpha-Me S5-pentenyl-alanine olefin amino acid connected by an all-carbon crosslinker comprising one double bond
  C-term NH2
LTFAEYAAQAASAA

SEQ ID NO: 263 - protein, 14 aa, Artificial Sequence
  Description of Artificial Sequence: Synthetic peptide
  N-term Ac
  MOD_RES (4)..(4): Alpha-Me R8-octenyl-alanine olefin amino acid connected by an all-carbon crosslinker comprising one double bond
  misc_feature (4)..(11): Crosslink between residues
  MOD_RES (7)..(7): 2-Naphthalanine
  MOD_RES (10)..(10): Cyclobutyl-Ala
  MOD_RES (11)..(11): Alpha-Me S5-pentenyl-alanine olefin amino acid connected by an all-carbon crosslinker comprising one double bond
  C-term NH2
LTFAEYAAQAASAA

SEQ ID NO: 264 - protein, 14 aa, Artificial Sequence
  Description of Artificial Sequence: Synthetic peptide
  N-term Ac
  MOD_RES (4)..(4): Alpha-Me R8-octenyl-alanine olefin amino acid connected by an all-carbon crosslinker comprising one double bond
  misc_feature (4)..(11): Crosslink between residues
  MOD_RES (10)..(10): Cyclobutyl-Ala
  MOD_RES (11)..(11): Alpha-Me S5-pentenyl-alanine olefin amino acid connected by an all-carbon crosslinker comprising one double bond
  C-term NH2
LTFAAYWAQAASAA

SEQ ID NO: 265 - protein, 14 aa, Artificial Sequence
  Description of Artificial Sequence: Synthetic peptide
  N-term Ac
  MOD_RES (4)..(4): Alpha-Me R8-octenyl-alanine olefin amino acid connected by an all-carbon crosslinker comprising one double bond
  misc_feature (4)..(11): Crosslink between residues
  MOD_RES (10)..(10): Cyclobutyl-Ala
  MOD_RES (11)..(11): Alpha-Me S5-pentenyl-alanine olefin amino acid connected by an all-carbon crosslinker comprising one double bond
  C-term NH2
LTFAEYWAQAASAF

SEQ ID NO: 266 - protein, 15 aa, Artificial Sequence
  Description of Artificial Sequence: Synthetic peptide
  N-term Ac
  MOD_RES (4)..(4): Alpha-Me R8-octenyl-alanine olefin amino acid connected by an all-carbon crosslinker comprising one double bond
  misc_feature (4)..(11): Crosslink between residues
  MOD_RES (10)..(10): Cyclobutyl-Ala
  MOD_RES (11)..(11): Alpha-Me S5-pentenyl-alanine olefin amino acid connected by an all-carbon crosslinker comprising one double bond
  MOD_RES (15)..(15): D-amino acid
  C-term NH2
LTFAEYWAQAASAFA

SEQ ID NO: 267 - protein, 14 aa, Artificial Sequence
  Description of Artificial Sequence: Synthetic peptide
  N-term Ac
  MOD_RES (4)..(4): Alpha-Me R8-octenyl-alanine olefin amino acid connected by an all-carbon crosslinker comprising one double bond
  misc_feature (4)..(11): Crosslink between residues
  MOD_RES (10)..(10): Cyclobutyl-Ala
  MOD_RES (11)..(11): Alpha-Me S5-pentenyl-alanine olefin amino acid connected by an all-carbon crosslinker comprising one double bond
  C-term NH2
LTFAAYWAQAASAF

SEQ ID NO: 268 - protein, 14 aa, Artificial Sequence
  Description of Artificial Sequence: Synthetic peptide
  N-term Ac
  MOD_RES (3)..(3): 3,4-difluoro Phe
  MOD_RES (4)..(4): Alpha-Me R8-octenyl-alanine olefin amino acid connected by an all-carbon crosslinker comprising one double bond
  misc_feature (4)..(11): Crosslink between residues
  MOD_RES (10)..(10): Cyclobutyl-Ala
  MOD_RES (11)..(11): Alpha-Me S5-pentenyl-alanine olefin amino acid connected by an all-carbon crosslinker comprising one double bond
  C-term NH2
LTFAAYWAQAASAF

SEQ ID NO: 269 - protein, 14 aa, Artificial Sequence
  Description of Artificial Sequence: Synthetic peptide
  N-term Ac
  MOD_RES (4)..(4): Alpha-Me R8-octenyl-alanine olefin amino acid connected by an all-carbon crosslinker comprising one double bond
  misc_feature (4)..(11): Crosslink between residues
  MOD_RES (6)..(6): 4-carboxy Phe
  MOD_RES (10)..(10): Cyclobutyl-Ala
  MOD_RES (11)..(11): Alpha-Me S5-pentenyl-alanine olefin amino acid connected by an all-carbon crosslinker comprising one double bond
  C-term NH2
LTFAAFWAQAASAF

SEQ ID NO: 270 - protein, 14 aa, Artificial Sequence
  Description of Artificial Sequence: Synthetic peptide
  N-term Ac
  MOD_RES (4)..(4): Alpha-Me R8-octenyl-alanine olefin amino acid connected by an all-carbon crosslinker comprising one double bond
  misc_feature (4)..(11): Crosslink between residues
  MOD_RES (7)..(7): 6cl-Trp
  MOD_RES (10)..(10): Cyclobutyl-Ala
  MOD_RES (11)..(11): Alpha-Me S5-pentenyl-alanine olefin amino acid connected by an all-carbon crosslinker comprising one double bond
  C-term NH2
LTFAEYWAQAASAF

SEQ ID NO: 271 - protein, 14 aa, Artificial Sequence
  Description of Artificial Sequence: Synthetic peptide
  N-term Ac
  MOD_RES (4)..(4): Alpha-Me R8-octenyl-alanine olefin amino acid connected by an all-carbon crosslinker comprising one double bond
  misc_feature (4)..(11): Crosslink between residues
  MOD_RES (10)..(10): Cyclobutyl-Ala
  MOD_RES (11)..(11): Alpha-Me S5-pentenyl-alanine olefin amino acid connected by an all-carbon crosslinker comprising one double bond
  C-term NH2
LTFAAYWSQAASAF

SEQ ID NO: 272 - protein, 14 aa, Artificial Sequence
  Description of Artificial Sequence: Synthetic peptide
  N-term Ac
  MOD_RES (4)..(4): Alpha-Me R8-octenyl-alanine olefin amino acid connected by an all-carbon crosslinker comprising one double bond
  misc_feature (4)..(11): Crosslink between residues
  MOD_RES (10)..(10): Cyclobutyl-Ala
  MOD_RES (11)..(11): Alpha-Me S5-pentenyl-alanine olefin amino acid connected by an all-carbon crosslinker comprising one double bond
  C-term NH2
LTFAAYWWQAASAF

SEQ ID NO: 273 - protein, 15 aa, Artificial Sequence
  Description of Artificial Sequence: Synthetic peptide
  N-term Ac
  MOD_RES (4)..(4): Alpha-Me R8-octenyl-alanine olefin amino acid connected by an all-carbon crosslinker comprising one double bond
  misc_feature (4)..(11): Crosslink between residues
  MOD_RES (10)..(10): Cyclobutyl-Ala
  MOD_RES (11)..(11): Alpha-Me S5-pentenyl-alanine olefin amino acid connected by an all-carbon crosslinker comprising one double bond
  MOD_RES (15)..(15): D-amino acid
  C-term NH2
LTFAAYWAQAAAAIA

SEQ ID NO: 274 - protein, 15 aa, Artificial Sequence
  Description of Artificial Sequence: Synthetic peptide
  N-term Ac
  MOD_RES (3)..(3): 3,4-difluoro Phe
  MOD_RES (4)..(4): Alpha-Me R8-octenyl-alanine olefin amino acid connected by an all-carbon crosslinker comprising one double bond
  misc_feature (4)..(11): Crosslink between residues
  MOD_RES (10)..(10): Cyclobutyl-Ala
  MOD_RES (11)..(11): Alpha-Me S5-pentenyl-alanine olefin amino acid connected by an all-carbon crosslinker comprising one double bond
  MOD_RES (15)..(15): D-amino acid
  C-term NH2
LTFAAYWAQAAAAIA

SEQ ID NO: 275 - protein, 15 aa, Artificial Sequence
  Description of Artificial Sequence: Synthetic peptide
  N-term Ac
  MOD_RES (4)..(4): Alpha-Me R8-octenyl-alanine olefin amino acid connected by an all-carbon crosslinker comprising one double bond
  misc_feature (4)..(11): Crosslink between residues
  MOD_RES (7)..(7): 6cl-Trp
  MOD_RES (10)..(10): Cyclobutyl-Ala
  MOD_RES (11)..(11): Alpha-Me S5-pentenyl-alanine olefin amino acid connected by an all-carbon crosslinker comprising one double bond
  MOD_RES (15)..(15): D-amino acid
  C-term NH2
LTFAAYWAQAAAAIA

SEQ ID NO: 276 - protein, 15 aa, Artificial Sequence
  Description of Artificial Sequence: Synthetic peptide
  N-term Ac
  MOD_RES (4)..(4): Alpha-Me R8-octenyl-alanine olefin amino acid connected by an all-carbon crosslinker comprising one double bond
  misc_feature (4)..(11): Crosslink between residues
  MOD_RES (6)..(6): 4-carboxy Phe
  MOD_RES (10)..(10): Cyclobutyl-Ala
  MOD_RES (11)..(11): Alpha-Me S5-pentenyl-alanine olefin amino acid connected by an all-carbon crosslinker comprising one double bond
  MOD_RES (15)..(15): D-amino acid
  C-term NH2
LTFAAFWAQAAAAIA

SEQ ID NO: 277 - protein, 15 aa, Artificial Sequence
  Description of Artificial Sequence: Synthetic peptide
  N-term Ac
  MOD_RES (4)..(4): Alpha-Me R8-octenyl-alanine olefin amino acid connected by an all-carbon crosslinker comprising one double bond
  misc_feature (4)..(11): Crosslink between residues
  MOD_RES (10)..(10): Cyclobutyl-Ala
  MOD_RES (11)..(11): Alpha-Me S5-pentenyl-alanine olefin amino acid connected by an all-carbon crosslinker comprising one double bond
  MOD_RES (15)..(15): D-amino acid
  C-term NH2
LTFAEYWAQAAAAFA

SEQ ID NO: 278 - protein, 15 aa, Artificial Sequence
  Description of Artificial Sequence: Synthetic peptide
  N-term Ac
  MOD_RES (4)..(4): Alpha-Me R8-octenyl-alanine olefin amino acid connected by an all-carbon crosslinker comprising one double bond
  misc_feature (4)..(11): Crosslink between residues
  MOD_RES (10)..(10): Cyclobutyl-Ala
  MOD_RES (11)..(11): Alpha-Me S5-pentenyl-alanine olefin amino acid connected by an all-carbon crosslinker comprising one double bond
  MOD_RES (15)..(15): D-amino acid
  C-term NH2
LTFAEYWAQAAAAFA

SEQ ID NO: 279 - protein, 15 aa, Artificial Sequence
  Description of Artificial Sequence: Synthetic peptide
  N-term Ac
  MOD_RES (4)..(4): Alpha-Me R8-octenyl-alanine olefin amino acid connected by an all-carbon crosslinker comprising one double bond
  misc_feature (4)..(11): Crosslink between residues
  MOD_RES (10)..(10): Cyclobutyl-Ala
  MOD_RES (11)..(11): Alpha-Me S5-pentenyl-alanine olefin amino acid connected by an all-carbon crosslinker comprising one double bond
  MOD_RES (14)..(14): Norleucine
  MOD_RES (15)..(15): D-amino acid
  C-term NH2
ETFAAYWAQAAAWLA

SEQ ID NO: 280 - protein, 15 aa, Artificial Sequence
  Description of Artificial Sequence: Synthetic peptide
  N-term Ac
  MOD_RES (4)..(4): Alpha-Me R8-octenyl-alanine olefin amino acid connected by an all-carbon crosslinker comprising one double bond
  misc_feature (4)..(11): Crosslink between residues
  MOD_RES (10)..(10): Cyclobutyl-Ala
  MOD_RES (11)..(11): Alpha-Me S5-pentenyl-alanine olefin amino acid connected by an all-carbon crosslinker comprising one double bond
  MOD_RES (14)..(14): Norleucine
  MOD_RES (15)..(15): D-amino acid
  C-term NH2
LTFAEYWAQAAAWLA

SEQ ID NO: 281 - protein, 15 aa, Artificial Sequence
  Description of Artificial Sequence: Synthetic peptide
  N-term Ac
  MOD_RES (4)..(4): Alpha-Me R8-octenyl-alanine olefin amino acid connected by an all-carbon crosslinker comprising one double bond
  misc_feature (4)..(11): Crosslink between residues
  MOD_RES (10)..(10): Cyclobutyl-Ala
  MOD_RES (11)..(11): Alpha-Me S5-pentenyl-alanine olefin amino acid connected by an all-carbon crosslinker comprising one double bond
  MOD_RES (14)..(14): Norleucine
  MOD_RES (15)..(15): D-amino acid
  C-term NH2
ETFAEYWAQAAAWLA

SEQ ID NO: 282 - protein, 15 aa, Artificial Sequence
  Description of Artificial Sequence: Synthetic peptide
  N-term Ac
  MOD_RES (4)..(4): Alpha-Me R8-octenyl-alanine olefin amino acid connected by an all-carbon crosslinker comprising one double bond
  misc_feature (4)..(11): Crosslink between residues
  MOD_RES (10)..(10): Cyclobutyl-Ala
  MOD_RES (11)..(11): Alpha-Me S5-pentenyl-alanine olefin amino acid connected by an all-carbon crosslinker comprising one double bond
  MOD_RES (14)..(14): Norleucine
  MOD_RES (15)..(15): D-amino acid
  C-term NH2
ETFAEYWAQAAAWLA

SEQ ID NO: 283 - protein, 15 aa, Artificial Sequence
  Description of Artificial Sequence: Synthetic peptide
  N-term Ac
  MOD_RES (4)..(4): Alpha-Me R8-octenyl-alanine olefin amino acid connected by an all-carbon crosslinker comprising one double bond
  misc_feature (4)..(11): Crosslink between residues
  MOD_RES (10)..(10): Cyclobutyl-Ala
  MOD_RES (11)..(11): Alpha-Me S5-pentenyl-alanine olefin amino acid connected by an all-carbon crosslinker comprising one double bond
  MOD_RES (15)..(15): D-amino acid
  C-term NH2
LTFAAYWAQAASAFA

SEQ ID NO: 284 - protein, 15 aa, Artificial Sequence
  Description of Artificial Sequence: Synthetic peptide
  N-term Ac
  MOD_RES (4)..(4): Alpha-Me R8-octenyl-alanine olefin amino acid connected by an all-carbon crosslinker comprising one double bond
  misc_feature (4)..(11): Crosslink between residues
  MOD_RES (10)..(10): Cyclobutyl-Ala
  MOD_RES (11)..(11): Alpha-Me S5-pentenyl-alanine olefin amino acid connected by an all-carbon crosslinker comprising one double bond
  MOD_RES (15)..(15): D-amino acid
  C-term NH2
LTFAAYWAQAASAFA

SEQ ID NO: 285 - protein, 15 aa, Artificial Sequence
  Description of Artificial Sequence: Synthetic peptide
  N-term Ac
  MOD_RES (4)..(4): Alpha-Me R8-octenyl-alanine olefin amino acid connected by an all-carbon crosslinker comprising one double bond
  misc_feature (4)..(11): Crosslink between residues
  MOD_RES (11)..(11): Alpha-Me S5-pentenyl-alanine olefin amino acid connected by an all-carbon crosslinker comprising one double bond
  MOD_RES (14)..(14): Norleucine
  MOD_RES (15)..(15): D-amino acid
  C-term NH2
ETFAAYWAQLAAWLA

SEQ ID NO: 286 - protein, 15 aa, Artificial Sequence
  Description of Artificial Sequence: Synthetic peptide
  N-term Ac
  MOD_RES (4)..(4): Alpha-Me R8-octenyl-alanine olefin amino acid connected by an all-carbon crosslinker comprising one double bond
  misc_feature (4)..(11): Crosslink between residues
  MOD_RES (11)..(11): Alpha-Me S5-pentenyl-alanine olefin amino acid connected by an all-carbon crosslinker comprising one double bond
  MOD_RES (14)..(14): Norleucine
  MOD_RES (15)..(15): D-amino acid
  C-term NH2
LTFAEYWAQLAAWLA

SEQ ID NO: 287 - protein, 15 aa, Artificial Sequence
  Description of Artificial Sequence: Synthetic peptide
  N-term Ac
  MOD_RES (4)..(4): Alpha-Me R8-octenyl-alanine olefin amino acid connected by an all-carbon crosslinker comprising one double bond
  misc_feature (4)..(11): Crosslink between residues
  MOD_RES (11)..(11): Alpha-Me S5-pentenyl-alanine olefin amino acid connected by an all-carbon crosslinker comprising one double bond
  MOD_RES (14)..(14): Norleucine
  MOD_RES (15)..(15): D-amino acid
  C-term NH2
ETFAEYWAQLAAWLA

SEQ ID NO: 288 - protein, 14 aa, Artificial Sequence
  Description of Artificial Sequence: Synthetic peptide
  N-term Dmaac
  MOD_RES (4)..(4): Alpha-Me R8-octenyl-alanine olefin amino acid connected by an all-carbon crosslinker comprising one double bond
  misc_feature (4)..(11): Crosslink between residues
  MOD_RES (10)..(10): hLeu
  MOD_RES (11)..(11): Alpha-Me S5-pentenyl-alanine olefin amino acid connected by an all-carbon crosslinker comprising one double bond
  C-term NH2
LTFAEYWAQLASAA

SEQ ID NO: 289 - protein, 14 aa, Artificial Sequence
  Description of Artificial Sequence: Synthetic peptide
  N-term Hexac
  MOD_RES (4)..(4): Alpha-Me R8-octenyl-alanine olefin amino acid connected by an all-carbon crosslinker comprising one double bond
  misc_feature (4)..(11): Crosslink between residues
  MOD_RES (10)..(10): hLeu
  MOD_RES (11)..(11): Alpha-Me S5-pentenyl-alanine olefin amino acid connected by an all-carbon crosslinker comprising one double bond
  C-term NH2
LTFAEYWAQLASAA

SEQ ID NO: 290 - protein, 14 aa, Artificial Sequence
  Description of Artificial Sequence: Synthetic peptide
  N-term Napac
  MOD_RES (4)..(4): Alpha-Me R8-octenyl-alanine olefin amino acid connected by an all-carbon crosslinker comprising one double bond
  misc_feature (4)..(11): Crosslink between residues
  MOD_RES (10)..(10): hLeu
  MOD_RES (11)..(11): Alpha-Me S5-pentenyl-alanine olefin amino acid connected by an all-carbon crosslinker comprising one double bond
  C-term NH2
LTFAEYWAQLASAA

SEQ ID NO: 291 - protein, 14 aa, Artificial Sequence
  Description of Artificial Sequence: Synthetic peptide
  N-term Decac
  MOD_RES (4)..(4): Alpha-Me R8-octenyl-alanine olefin amino acid connected by an all-carbon crosslinker comprising one double bond
  misc_feature (4)..(11): Crosslink between residues
  MOD_RES (10)..(10): hLeu
  MOD_RES (11)..(11): Alpha-Me S5-pentenyl-alanine olefin amino acid connected by an all-carbon crosslinker comprising one double bond
  C-term NH2
LTFAEYWAQLASAA

SEQ ID NO: 292 - protein, 14 aa, Artificial Sequence
  Description of Artificial Sequence: Synthetic peptide
  N-term Admac
  MOD_RES (4)..(4): Alpha-Me R8-octenyl-alanine olefin amino acid connected by an all-carbon crosslinker comprising one double bond
  misc_feature (4)..(11): Crosslink between residues
  MOD_RES (10)..(10): hLeu
  MOD_RES (11)..(11): Alpha-Me S5-pentenyl-alanine olefin amino acid connected by an all-carbon crosslinker comprising one double bond
  C-term NH2
LTFAEYWAQLASAA

SEQ ID NO: 293 - protein, 14 aa, Artificial Sequence
  Description of Artificial Sequence: Synthetic peptide
  N-term Tmac
  MOD_RES (4)..(4): Alpha-Me R8-octenyl-alanine olefin amino acid connected by an all-carbon crosslinker comprising one double bond
  misc_feature (4)..(11): Crosslink between residues
  MOD_RES (10)..(10): hLeu
  MOD_RES (11)..(11): Alpha-Me S5-pentenyl-alanine olefin amino acid connected by an all-carbon crosslinker comprising one double bond
  C-term NH2
LTFAEYWAQLASAA

SEQ ID NO: 294 - protein, 14 aa, Artificial Sequence
  Description of Artificial Sequence: Synthetic peptide
  N-term Pam
  MOD_RES (4)..(4): Alpha-Me R8-octenyl-alanine olefin amino acid connected by an all-carbon crosslinker comprising one double bond
  misc_feature (4)..(11): Crosslink between residues
  MOD_RES (10)..(10): hLeu
  MOD_RES (11)..(11): Alpha-Me S5-pentenyl-alanine olefin amino acid connected by an all-carbon crosslinker comprising one double bond
  C-term NH2
LTFAEYWAQLASAA

SEQ ID NO: 295 - protein, 15 aa, Artificial Sequence
  Description of Artificial Sequence: Synthetic peptide
  N-term Ac
  MOD_RES (4)..(4): Alpha-Me R8-octenyl-alanine olefin amino acid connected by an all-carbon crosslinker comprising one double bond
  misc_feature (4)..(11): Crosslink between residues
  MOD_RES (10)..(10): Cyclobutyl-Ala
  MOD_RES (11)..(11): Alpha-Me S5-pentenyl-alanine olefin amino acid connected by an all-carbon crosslinker comprising one double bond
  MOD_RES (14)..(14): Norleucine
  C-term NH2
LTFAAYWAQAAAALA

SEQ ID NO: 296 - protein, 15 aa, Artificial Sequence
  Description of Artificial Sequence: Synthetic peptide
  N-term Ac
  MOD_RES (3)..(3): 3,4-difluoro Phe
  MOD_RES (4)..(4): Alpha-Me R8-octenyl-alanine olefin amino acid connected by an all-carbon crosslinker comprising one double bond
  misc_feature (4)..(11): Crosslink between residues
  MOD_RES (10)..(10): Cyclobutyl-Ala
  MOD_RES (11)..(11): Alpha-Me S5-pentenyl-alanine olefin amino acid connected by an all-carbon crosslinker comprising one double bond
  MOD_RES (15)..(15): D-amino acid
  C-term NH2
LTFAEYWAQAAAAIA

SEQ ID NO: 297 - protein, 14 aa, Artificial Sequence
  Description of Artificial Sequence: Synthetic peptide
  N-term Ac
  MOD_RES (3)..(3): 3,4-difluoro Phe
  MOD_RES (4)..(4): Alpha-Me R8-octenyl-alanine olefin amino acid connected by an all-carbon crosslinker comprising one double bond
  misc_feature (4)..(11): Crosslink between residues
  MOD_RES (10)..(10): Cyclobutyl-Ala
  MOD_RES (11)..(11): Alpha-Me S5-pentenyl-alanine olefin amino acid connected by an all-carbon crosslinker comprising one double bond
  C-term NH2
LTFAEYWAQAASAA

SEQ ID NO: 298 - protein, 14 aa, Artificial Sequence
  Description of Artificial Sequence: Synthetic peptide
  N-term Ac
  MOD_RES (3)..(3): 3,4-difluoro Phe
  MOD_RES (4)..(4): Alpha-Me R8-octenyl-alanine olefin amino acid connected by an all-carbon crosslinker comprising one double bond
  misc_feature (4)..(11): Crosslink between residues
  MOD_RES (10)..(10): Cyclobutyl-Ala
  MOD_RES (11)..(11): Alpha-Me S5-pentenyl-alanine olefin amino acid connected by an all-carbon crosslinker comprising one double bond
  C-term NH2
LTFAEYWAQAASAA

SEQ ID NO: 299 - protein, 14 aa, Artificial Sequence
  Description of Artificial Sequence: Synthetic peptide
  N-term Ac
  MOD_RES (4)..(4): Alpha-Me R8-octenyl-alanine olefin amino acid connected by an all-carbon crosslinker comprising one double bond
  misc_feature (4)..(11): Crosslink between residues
  MOD_RES (6)..(6): 4-carboxy Phe
  MOD_RES (10)..(10): Cyclobutyl-Ala
  MOD_RES (11)..(11): Alpha-Me S5-pentenyl-alanine olefin amino acid connected by an all-carbon crosslinker comprising one double bond
  C-term NH2
LTFAEFWAQAASAA

SEQ ID NO: 300 - protein, 14 aa, Artificial Sequence
  Description of Artificial Sequence: Synthetic peptide
  N-term Ac
  MOD_RES (4)..(4): Alpha-Me R8-octenyl-alanine olefin amino acid connected by an all-carbon crosslinker comprising one double bond
  misc_feature (4)..(11): Crosslink between residues
  MOD_RES (6)..(6): 4-carboxy Phe
  MOD_RES (10)..(10): Cyclobutyl-Ala
  MOD_RES (11)..(11): Alpha-Me S5-pentenyl-alanine olefin amino acid connected by an all-carbon crosslinker comprising one double bond
  C-term NH2
LTFAEFWAQAASAA

SEQ ID NO: 301 - protein, 14 aa, Artificial Sequence
  Description of Artificial Sequence: Synthetic peptide
  N-term Ac
  MOD_RES (4)..(4): Alpha-Me R8-octenyl-alanine olefin amino acid connected by an all-carbon crosslinker comprising one double bond
  misc_feature (4)..(11): Crosslink between residues
  MOD_RES (10)..(10): Cyclobutyl-Ala
  MOD_RES (11)..(11): Alpha-Me S5-pentenyl-alanine olefin amino acid connected by an all-carbon crosslinker comprising one double bond
  C-term NH2
LTFAEYWSQAASAA

SEQ ID NO: 302 - protein, 14 aa, Artificial Sequence
  Description of Artificial Sequence: Synthetic peptide
  N-term Ac
  MOD_RES (4)..(4): Alpha-Me R8-octenyl-alanine olefin amino acid connected by an all-carbon crosslinker comprising one double bond
  misc_feature (4)..(11): Crosslink between residues
  MOD_RES (10)..(10): Cyclobutyl-Ala
  MOD_RES (11)..(11): Alpha-Me S5-pentenyl-alanine olefin amino acid connected by an all-carbon crosslinker comprising one double bond
  C-term NH2
LTFAEYWSQAASAA

SEQ ID NO: 303 - protein, 14 aa, Artificial Sequence
  Description of Artificial Sequence: Synthetic peptide
  N-term Ac
  MOD_RES (4)..(4): Alpha-Me R8-octenyl-alanine olefin amino acid connected by an all-carbon crosslinker comprising one double bond
  misc_feature (4)..(11): Crosslink between residues
  MOD_RES (10)..(10): hLeu
  MOD_RES (11)..(11): Alpha-Me S5-pentenyl-alanine olefin amino acid connected by an all-carbon crosslinker comprising one double bond
  C-term NH2
LTFAEYWAQLASAA

SEQ ID NO: 304 - protein, 14 aa, Artificial Sequence
  Description of Artificial Sequence: Synthetic peptide
  N-term Ac
  MOD_RES (4)..(4): Alpha-Me R8-octenyl-alanine olefin amino acid connected by an all-carbon crosslinker comprising one double bond
  misc_feature (4)..(11): Crosslink between residues
  MOD_RES (10)..(10): hLeu
  MOD_RES (11)..(11): Alpha-Me S5-pentenyl-alanine olefin amino acid connected by an all-carbon crosslinker comprising one double bond
  C-term NH2
LTFAAYWAQLASAF

SEQ ID NO: 305 - protein, 14 aa, Artificial Sequence
  Description of Artificial Sequence: Synthetic peptide
  N-term Ac
  MOD_RES (4)..(4): Alpha-Me R8-octenyl-alanine olefin amino acid connected by an all-carbon crosslinker comprising one double bond
  misc_feature (4)..(11): Crosslink between residues
  MOD_RES (10)..(10): hLeu
  MOD_RES (11)..(11): Alpha-Me S5-pentenyl-alanine olefin amino acid connected by an all-carbon crosslinker comprising one double bond
  C-term NH2
LTFAAYWAQLASAF

SEQ ID NO: 306 - protein, 14 aa, Artificial Sequence
  Description of Artificial Sequence: Synthetic peptide
  N-term Ac
  MOD_RES (3)..(3): 3,4-difluoro Phe
  MOD_RES (4)..(4): Alpha-Me R8-octenyl-alanine olefin amino acid connected by an all-carbon crosslinker comprising one double bond
  misc_feature (4)..(11): Crosslink between residues
  MOD_RES (10)..(10): hLeu
  MOD_RES (11)..(11): Alpha-Me S5-pentenyl-alanine olefin amino acid connected by an all-carbon crosslinker comprising one double bond
  C-term NH2
LTFAAYWAQLASAA

SEQ ID NO: 307 - protein, 14 aa, Artificial Sequence
  Description of Artificial Sequence: Synthetic peptide
  N-term Ac
  MOD_RES (3)..(3): 3,4-difluoro Phe
  MOD_RES (4)..(4): Alpha-Me R8-octenyl-alanine olefin amino acid connected by an all-carbon crosslinker comprising one double bond
  misc_feature (4)..(11): Crosslink between residues
  MOD_RES (10)..(10): hLeu
  MOD_RES (11)..(11): Alpha-Me S5-pentenyl-alanine olefin amino acid connected by an all-carbon crosslinker comprising one double bond
  C-term NH2
LTFAAYWAQLASAA

SEQ ID NO: 308 - protein, 14 aa, Artificial Sequence
  Description of Artificial Sequence: Synthetic peptide
  N-term Ac
  MOD_RES (4)..(4): Alpha-Me R8-octenyl-alanine olefin amino acid connected by an all-carbon crosslinker comprising one double bond
  misc_feature (4)..(11): Crosslink between residues
  MOD_RES (6)..(6): 4-carboxy Phe
  MOD_RES (10)..(10): hLeu
  MOD_RES (11)..(11): Alpha-Me S5-pentenyl-alanine olefin amino acid connected by an all-carbon crosslinker comprising one double bond
  C-term NH2
LTFAAFWAQLASAA

SEQ ID NO: 309 - protein, 14 aa, Artificial Sequence
  Description of Artificial Sequence: Synthetic peptide
  N-term Ac
  MOD_RES (4)..(4): Alpha-Me R8-octenyl-alanine olefin amino acid connected by an all-carbon crosslinker comprising one double bond
  misc_feature (4)..(11): Crosslink between residues
  MOD_RES (6)..(6): 4-carboxy Phe
  MOD_RES (10)..(10): hLeu
  MOD_RES (11)..(11): Alpha-Me S5-pentenyl-alanine olefin amino acid connected by an all-carbon crosslinker comprising one double bond
  C-term NH2
LTFAAFWAQLASAA

SEQ ID NO: 310 - protein, 14 aa, Artificial Sequence
  Description of Artificial Sequence: Synthetic peptide
  N-term Ac
  MOD_RES (4)..(4): Alpha-Me R8-octenyl-alanine olefin amino acid connected by an all-carbon crosslinker comprising one double bond
  misc_feature (4)..(11): Crosslink between residues
  MOD_RES (10)..(10): hLeu
  MOD_RES (11)..(11): Alpha-Me S5-pentenyl-alanine olefin amino acid connected by an all-carbon crosslinker comprising one double bond
  C-term NH2
LTFAAYWSQLASAA

SEQ ID NO: 311 - protein, 14 aa, Artificial Sequence
  Description of Artificial Sequence: Synthetic peptide
  N-term Ac
  MOD_RES (4)..(4): Alpha-Me R8-octenyl-alanine olefin amino acid connected by an all-carbon crosslinker comprising one double bond
  misc_feature (4)..(11): Crosslink between residues
  MOD_RES (10)..(10): hLeu
  MOD_RES (11)..(11): Alpha-Me S5-pentenyl-alanine olefin amino acid connected by an all-carbon crosslinker comprising one double bond
  C-term NH2
LTFAAYWSQLASAA

SEQ ID NO: 312 - protein, 15 aa, Artificial Sequence
  Description of Artificial Sequence: Synthetic peptide
  N-term Ac
  MOD_RES (4)..(4): Alpha-Me R8-octenyl-alanine olefin amino acid connected by an all-carbon crosslinker comprising one double bond
  misc_feature (4)..(11): Crosslink between residues
  MOD_RES (11)..(11): Alpha-Me S5-pentenyl-alanine olefin amino acid connected by an all-carbon crosslinker comprising one double bond
  MOD_RES (14)..(14): Norleucine
  C-term NH2
LTFAEYWAQLAAALA

SEQ ID NO: 313 - protein, 15 aa, Artificial Sequence
  Description of Artificial Sequence: Synthetic peptide
  N-term Ac
  MOD_RES (3)..(3): 3,4-difluoro Phe
  MOD_RES (4)..(4): Alpha-Me R8-octenyl-alanine olefin amino acid connected by an all-carbon crosslinker comprising one double bond
  misc_feature (4)..(11): Crosslink between residues
  MOD_RES (11)..(11): Alpha-Me S5-pentenyl-alanine olefin amino acid connected by an all-carbon crosslinker comprising one double bond
  MOD_RES (14)..(14): Norleucine
  C-term NH2
LTFAAYWAQLAAALA

SEQ ID NO: 314 - protein, 15 aa, Artificial Sequence
  Description of Artificial Sequence: Synthetic peptide
  N-term Ac
  MOD_RES (4)..(4): Alpha-Me R8-octenyl-alanine olefin amino acid connected by an all-carbon crosslinker comprising one double bond
  misc_feature (4)..(11): Crosslink between residues
  MOD_RES (6)..(6): 4-carboxy Phe
  MOD_RES (11)..(11): Alpha-Me S5-pentenyl-alanine olefin amino acid connected by an all-carbon crosslinker comprising one double bond
  MOD_RES (14)..(14): Norleucine
  C-term NH2
LTFAAFWAQLAAALA

SEQ ID NO: 315 - protein, 15 aa, Artificial Sequence
  Description of Artificial Sequence: Synthetic peptide
  N-term Ac
  MOD_RES (4)..(4): Alpha-Me R8-octenyl-alanine olefin amino acid connected by an all-carbon crosslinker comprising one double bond
  misc_feature (4)..(11): Crosslink between residues
  MOD_RES (11)..(11): Alpha-Me S5-pentenyl-alanine olefin amino acid connected by an all-carbon crosslinker comprising one double bond
  MOD_RES (14)..(14): Norleucine
  C-term NH2
LTFAAYWSQLAAALA

SEQ ID NO: 316 - protein, 15 aa, Artificial Sequence
  Description of Artificial Sequence: Synthetic peptide
  N-term Ac
  MOD_RES (3)..(3): 3,4-difluoro Phe
  MOD_RES (4)..(4): Alpha-Me R8-octenyl-alanine olefin amino acid connected by an all-carbon crosslinker comprising one double bond
  misc_feature (4)..(11): Crosslink between residues
  MOD_RES (10)..(10): hLeu
  MOD_RES (11)..(11): Alpha-Me S5-pentenyl-alanine olefin amino acid connected by an all-carbon crosslinker comprising one double bond
  MOD_RES (14)..(14): Norleucine
  C-term NH2
LTFAAYWAQLAAALA

SEQ ID NO: 317 - protein, 15 aa, Artificial Sequence
  Description of Artificial Sequence: Synthetic peptide
  N-term Ac
  MOD_RES (3)..(3): 3,4-difluoro Phe
  MOD_RES (4)..(4): Alpha-Me R8-octenyl-alanine olefin amino acid connected by an all-carbon crosslinker comprising one double bond
  misc_feature (4)..(11): Crosslink between residues
  MOD_RES (10)..(10): hLeu
  MOD_RES (11)..(11): Alpha-Me S5-pentenyl-alanine olefin amino acid connected by an all-carbon crosslinker comprising one double bond
  MOD_RES (14)..(14): Norleucine
  C-term NH2
LTFAAYWAQLAAALA

SEQ ID NO: 318 - protein, 15 aa, Artificial Sequence
  Description of Artificial Sequence: Synthetic peptide
  N-term Ac
  MOD_RES (4)..(4): Alpha-Me R8-octenyl-alanine olefin amino acid connected by an all-carbon crosslinker comprising one double bond
  misc_feature (4)..(11): Crosslink between residues
  MOD_RES (6)..(6): 4-carboxy Phe
  MOD_RES (10)..(10): hLeu
  MOD_RES (11)..(11): Alpha-Me S5-pentenyl-alanine olefin amino acid connected by an all-carbon crosslinker comprising one double bond
  MOD_RES (14)..(14): Norleucine
  C-term NH2
LTFAAFWAQLAAALA

SEQ ID NO: 319 - protein, 15 aa, Artificial Sequence
  Description of Artificial Sequence: Synthetic peptide
  N-term Ac
  MOD_RES (4)..(4): Alpha-Me R8-octenyl-alanine olefin amino acid connected by an all-carbon crosslinker comprising one double bond
  misc_feature (4)..(11): Crosslink between residues
  MOD_RES (6)..(6): 4-carboxy Phe
  MOD_RES (10)..(10): hLeu
  MOD_RES (11)..(11): Alpha-Me S5-pentenyl-alanine olefin amino acid connected by an all-carbon crosslinker comprising one double bond
  MOD_RES (14)..(14): Norleucine
  C-term NH2
LTFAAFWAQLAAALA

SEQ ID NO: 320 - protein, 15 aa, Artificial Sequence
  Description of Artificial Sequence: Synthetic peptide
  N-term Ac
  MOD_RES (4)..(4): Alpha-Me R8-octenyl-alanine olefin amino acid connected by an all-carbon crosslinker comprising one double bond
  misc_feature (4)..(11): Crosslink between residues
  MOD_RES (10)..(10): hLeu
  MOD_RES (11)..(11): Alpha-Me S5-pentenyl-alanine olefin amino acid connected by an all-carbon crosslinker comprising one double bond
  MOD_RES (14)..(14): Norleucine
  C-term NH2
LTFAAYWSQLAAALA

SEQ ID NO: 321 - protein, 15 aa, Artificial Sequence
  Description of Artificial Sequence: Synthetic peptide
  N-term Ac
  MOD_RES (4)..(4): Alpha-Me R8-octenyl-alanine olefin amino acid connected by an all-carbon crosslinker comprising one double bond
  misc_feature (4)..(11): Crosslink between residues
  MOD_RES (10)..(10): hLeu
  MOD_RES (11)..(11): Alpha-Me S5-pentenyl-alanine olefin amino acid connected by an all-carbon crosslinker comprising one double bond
  MOD_RES (14)..(14): Norleucine
  C-term NH2
LTFAAYWSQLAAALA

SEQ ID NO: 322 - protein, 16 aa, Artificial Sequence
  Description of Artificial Sequence: Synthetic peptide
  N-term Ac
  MOD_RES (4)..(4): Alpha-Me R8-octenyl-alanine olefin amino acid connected by an all-carbon crosslinker comprising one double bond
  misc_feature (4)..(11): Crosslink between residues
  MOD_RES (10)..(10): hLeu
  MOD_RES (11)..(11): Alpha-Me S5-pentenyl-alanine olefin amino acid connected by an all-carbon crosslinker comprising one double bond
  MOD_RES (16)..(16): D-amino acid
  C-term NH2
LTFAAYWAQLAAAAAA

SEQ ID NO: 323 - protein, 16 aa, Artificial Sequence
  Description of Artificial Sequence: Synthetic peptide
  N-term Ac
  MOD_RES (4)..(4): Alpha-Me R8-octenyl-alanine olefin amino acid connected by an all-carbon crosslinker comprising one double bond
  misc_feature (4)..(11): Crosslink between residues
  MOD_RES (10)..(10): hLeu
  MOD_RES (11)..(11): Alpha-Me S5-pentenyl-alanine olefin amino acid connected by an all-carbon crosslinker comprising one double bond
  MOD_RES (16)..(16): D-amino acid
  C-term NH2
LTFAAYWAQLAAAAAA

SEQ ID NO: 324 - protein, 17 aa, Artificial Sequence
  Description of Artificial Sequence: Synthetic peptide
  N-term Ac
  MOD_RES (4)..(4): Alpha-Me R8-octenyl-alanine olefin amino acid connected by an all-carbon crosslinker comprising one double bond
  misc_feature (4)..(11): Crosslink between residues
  MOD_RES (11)..(11): Alpha-Me S5-pentenyl-alanine olefin amino acid connected by an all-carbon crosslinker comprising one double bond
  MOD_RES (17)..(17): D-amino acid
  C-term NH2
LTFAAYWAQLAAAAAAA

SEQ ID NO: 325 - protein, 18 aa, Artificial Sequence
  Description of Artificial Sequence: Synthetic peptide
  N-term Ac
  MOD_RES (4)..(4): Alpha-Me R8-octenyl-alanine olefin amino acid connected by an all-carbon crosslinker comprising one double bond
  misc_feature (4)..(11): Crosslink between residues
  MOD_RES (11)..(11): Alpha-Me S5-pentenyl-alanine olefin amino acid connected by an all-carbon crosslinker comprising one double bond
  MOD_RES (18)..(18): D-amino acid
  C-term NH2
LTFAAYWAQLAAAAAAAA

SEQ ID NO: 326 - protein, 18 aa, Artificial Sequence
  Description of Artificial Sequence: Synthetic peptide
  N-term Ac
  MOD_RES (4)..(4): Alpha-Me R8-octenyl-alanine olefin amino acid connected by an all-carbon crosslinker comprising one double bond
  misc_feature (4)..(11): Crosslink between residues
  MOD_RES (11)..(11): Alpha-Me S5-pentenyl-alanine olefin amino acid connected by an all-carbon crosslinker comprising one double bond
  MOD_RES (18)..(18): D-amino acid
  C-term NH2
LTFAAYWAQLAAAAAAAA

SEQ ID NO: 327 - protein, 15 aa, Artificial Sequence
  Description of Artificial Sequence: Synthetic peptide
  N-term Ac
  MOD_RES (4)..(4): Alpha-Me R8-octenyl-alanine olefin amino acid connected by an all-carbon crosslinker comprising one double bond
  misc_feature (4)..(11): Crosslink between residues
  MOD_RES (10)..(10): hLeu
  MOD_RES (11)..(11): Alpha-Me S5-pentenyl-alanine olefin amino acid connected by an all-carbon crosslinker comprising one double bond
  MOD_RES (14)..(14): Norleucine
  C-term NH2
LTFAEYWAQLAAALA

SEQ ID NO: 328 - protein, 16 aa, Artificial Sequence
  Description of Artificial Sequence: Synthetic peptide
  N-term Ac
  MOD_RES (5)..(5): Alpha-Me R8-octenyl-alanine olefin amino acid connected by an all-carbon crosslinker comprising one double bond
  misc_feature (5)..(12): Crosslink between residues
  MOD_RES (12)..(12): Alpha-Me S5-pentenyl-alanine olefin amino acid connected by an all-carbon crosslinker comprising one double bond
  MOD_RES (15)..(15): Norleucine
  C-term NH2
AATFAAYWAQLAAALA

SEQ ID NO: 329 - protein, 16 aa, Artificial Sequence
  Description of Artificial Sequence: Synthetic peptide
  N-term Ac
  MOD_RES (4)..(4): Alpha-Me R8-octenyl-alanine olefin amino acid connected by an all-carbon crosslinker comprising one double bond
  misc_feature (4)..(11): Crosslink between residues
  MOD_RES (11)..(11): Alpha-Me S5-pentenyl-alanine olefin amino acid connected by an all-carbon crosslinker comprising one double bond
  MOD_RES (14)..(14): Norleucine
  C-term NH2
LTFAAYWAQLAAALAA

SEQ ID NO: 330 - protein, 17 aa, Artificial Sequence
  Description of Artificial Sequence: Synthetic peptide
  N-term Ac
  MOD_RES (5)..(5): Alpha-Me R8-octenyl-alanine olefin amino acid connected by an all-carbon crosslinker comprising one double bond
  misc_feature (5)..(12): Crosslink between residues
  MOD_RES (12)..(12): Alpha-Me S5-pentenyl-alanine olefin amino acid connected by an all-carbon crosslinker comprising one double bond
  MOD_RES (15)..(15): Norleucine
  C-term NH2
ALTFAAYWAQLAAALAA

SEQ ID NO: 331 - protein, 16 aa, Artificial Sequence
  Description of Artificial Sequence: Synthetic peptide
  N-term Ac
  MOD_RES (4)..(4): Alpha-Me R8-octenyl-alanine olefin amino acid connected by an all-carbon crosslinker comprising one double bond
  misc_feature (4)..(11): Crosslink between residues
  MOD_RES (10)..(10): Cyclobutyl-Ala
  MOD_RES (11)..(11): Alpha-Me S5-pentenyl-alanine olefin amino acid connected by an all-carbon crosslinker comprising one double bond
  MOD_RES (14)..(14): Norleucine
  C-term NH2
LTFAAYWAQAAAALAA

SEQ ID NO: 332 - protein, 16 aa, Artificial Sequence
  Description of Artificial Sequence: Synthetic peptide
  N-term Ac
  MOD_RES (4)..(4): Alpha-Me R8-octenyl-alanine olefin amino acid connected by an all-carbon crosslinker comprising one double bond
  misc_feature (4)..(11): Crosslink between residues
  MOD_RES (10)..(10): hLeu
  MOD_RES (11)..(11): Alpha-Me S5-pentenyl-alanine olefin amino acid connected by an all-carbon crosslinker comprising one double bond
  MOD_RES (14)..(14): Norleucine
  C-term NH2
LTFAAYWAQLAAALAA

SEQ ID NO: 333 - protein, 15 aa, Artificial Sequence
  Description of Artificial Sequence: Synthetic peptide
  N-term Ac
  MOD_RES (4)..(4): Alpha-Me R8-octenyl-alanine olefin amino acid connected by an all-carbon crosslinker comprising one double bond
  misc_feature (4)..(11): Crosslink between residues
  MOD_RES (10)..(10): Cyclobutyl-Ala
  MOD_RES (11)..(11): Alpha-Me S5-pentenyl-alanine olefin amino acid connected by an all-carbon crosslinker comprising one double bond
  C-term NH2
LTFAEYWAQAASAAA

SEQ ID NO: 334 - protein, 15 aa, Artificial Sequence
  Description of Artificial Sequence: Synthetic peptide
  N-term Ac
  MOD_RES (4)..(4): Alpha-Me R8-octenyl-alanine olefin amino acid connected by an all-carbon crosslinker comprising one double bond
  misc_feature (4)..(11): Crosslink between residues
  MOD_RES (10)..(10): Cyclobutyl-Ala
  MOD_RES (11)..(11): Alpha-Me S5-pentenyl-alanine olefin amino acid connected by an all-carbon crosslinker comprising one double bond
  C-term NH2
LTFAEYWAQAASAAA

SEQ ID NO: 335 - protein, 16 aa, Artificial Sequence
  Description of Artificial Sequence: Synthetic peptide
  N-term Ac
  MOD_RES (4)..(4): Alpha-Me R8-octenyl-alanine olefin amino acid connected by an all-carbon crosslinker comprising one double bond
  misc_feature (4)..(11): Crosslink between residues
  MOD_RES (10)..(10): Cyclobutyl-Ala
  MOD_RES (11)..(11): Alpha-Me S5-pentenyl-alanine olefin amino acid connected by an all-carbon crosslinker comprising one double bond
  C-term NH2
LTFAEYWAQAASAAAA

SEQ ID NO: 336 - protein, 16 aa, Artificial Sequence
  Description of Artificial Sequence: Synthetic peptide
  N-term Ac
  MOD_RES (4)..(4): Alpha-Me R8-octenyl-alanine olefin amino acid connected by an all-carbon crosslinker comprising one double bond
  misc_feature (4)..(11): Crosslink between residues
  MOD_RES (10)..(10): Cyclobutyl-Ala
  MOD_RES (11)..(11): Alpha-Me S5-pentenyl-alanine olefin amino acid connected by an all-carbon crosslinker comprising one double bond
  C-term NH2
LTFAEYWAQAASAAAA

SEQ ID NO: 337 - protein, 15 aa, Artificial Sequence
  Description of Artificial Sequence: Synthetic peptide
  N-term Ac
  MOD_RES (5)..(5): Alpha-Me R8-octenyl-alanine olefin amino acid connected by an all-carbon crosslinker comprising one double bond
  misc_feature (5)..(12): Crosslink between residues
  MOD_RES (11)..(11): Cyclobutyl-Ala
  MOD_RES (12)..(12): Alpha-Me S5-pentenyl-alanine olefin amino acid connected by an all-carbon crosslinker comprising one double bond
  C-term NH2
ALTFAEYWAQAASAA

SEQ ID NO: 338 - protein, 16 aa, Artificial Sequence
  Description of Artificial Sequence: Synthetic peptide
  N-term Ac
  MOD_RES (5)..(5): Alpha-Me R8-octenyl-alanine olefin amino acid connected by an all-carbon crosslinker comprising one double bond
  misc_feature (5)..(12): Crosslink between residues
  MOD_RES (11)..(11): Cyclobutyl-Ala
  MOD_RES (12)..(12): Alpha-Me S5-pentenyl-alanine olefin amino acid connected by an all-carbon crosslinker comprising one double bond
  C-term NH2
ALTFAEYWAQAASAAA

SEQ ID NO: 339 - protein, 15 aa, Artificial Sequence
  Description of Artificial Sequence: Synthetic peptide
  N-term Ac
  MOD_RES (5)..(5): Alpha-Me R8-octenyl-alanine olefin amino acid connected by an all-carbon crosslinker comprising one double bond
  misc_feature (5)..(12): Crosslink between residues
  MOD_RES (11)..(11): Cyclobutyl-Ala
  MOD_RES (12)..(12): Alpha-Me S5-pentenyl-alanine olefin amino acid connected by an all-carbon crosslinker comprising one double bond
  C-term NH2
ALTFAEYWAQAASAA

SEQ ID NO: 340 - protein, 17 aa, Artificial Sequence
  Description of Artificial Sequence: Synthetic peptide
  N-term Ac
  MOD_RES (4)..(4): Alpha-Me R8-octenyl-alanine olefin amino acid connected by an all-carbon crosslinker comprising one double bond
  misc_feature (4)..(11): Crosslink between residues
  MOD_RES (11)..(11): Alpha-Me S5-pentenyl-alanine olefin amino acid connected by an all-carbon crosslinker comprising one double bond
  MOD_RES (17)..(17): D-amino acid
  C-term NH2
LTFAEYWAQLAAAAAAA

SEQ ID NO: 341 - protein, 14 aa, Artificial Sequence
  Description of Artificial Sequence: Synthetic peptide
  N-term Ac
  MOD_RES (4)..(4): Alpha-Me R8-octenyl-alanine olefin amino acid connected by an all-carbon crosslinker comprising one double bond
  misc_feature (4)..(11): Crosslink between residues
  MOD_RES (7)..(7): 6cl-Trp
  MOD_RES (10)..(10): Cyclobutyl-Ala
  MOD_RES (11)..(11): Alpha-Me S5-pentenyl-alanine olefin amino acid connected by an all-carbon crosslinker comprising one double bond
  C-term NH2
LTFAEYWAQAASAA

SEQ ID NO: 342 - protein, 15 aa, Artificial Sequence
  Description of Artificial Sequence: Synthetic peptide
  N-term Ac
  MOD_RES (4)..(4): Alpha-Me R8-octenyl-alanine olefin amino acid connected by an all-carbon crosslinker comprising one double bond
  misc_feature (4)..(11): Crosslink between residues
  MOD_RES (6)..(6): 4-carboxy Phe
  MOD_RES (7)..(7): 6cl-Trp
  MOD_RES (10)..(10): Cyclobutyl-Ala
  MOD_RES (11)..(11): Alpha-Me S5-pentenyl-alanine olefin amino acid connected by an all-carbon crosslinker comprising one double bond
  MOD_RES (14)..(14): Norleucine
  C-term NH2
LTFAEFWAQAASALA

SEQ ID NO: 343 - protein, 15 aa, Artificial Sequence
  Description of Artificial Sequence: Synthetic peptide
  N-term Ac
  MOD_RES (4)..(4): Alpha-Me R8-octenyl-alanine olefin amino acid connected by an all-carbon crosslinker comprising one double bond
  misc_feature (4)..(11): Crosslink between residues
  MOD_RES (6)..(6): 4-carboxy Phe
  MOD_RES (7)..(7): 6cl-Trp
  MOD_RES (10)..(10): Cyclobutyl-Ala
  MOD_RES (11)..(11): Alpha-Me S5-pentenyl-alanine olefin amino acid connected by an all-carbon crosslinker comprising one double bond
  MOD_RES (14)..(14): Norleucine
  C-term NH2
LTFAEFWAQAASALA

SEQ ID NO: 344 - protein, 15 aa, Artificial Sequence
  Description of Artificial Sequence: Synthetic peptide
  N-term Ac
  MOD_RES (4)..(4): Alpha-Me R8-octenyl-alanine olefin amino acid connected by an all-carbon crosslinker comprising one double bond
  misc_feature (4)..(11): Crosslink between residues
  MOD_RES (6)..(6): 4-carboxy Phe
  MOD_RES (7)..(7): 6cl-Trp
  MOD_RES (10)..(10): Cyclobutyl-Ala
  MOD_RES (11)..(11): Alpha-Me S5-pentenyl-alanine olefin amino acid connected by an all-carbon crosslinker comprising one double bond
  MOD_RES (15)..(15): D-amino acid
  C-term NH2
LTFAEFWAQAAAAIA

SEQ ID NO: 345 - protein, 15 aa, Artificial Sequence
  Description of Artificial Sequence: Synthetic peptide
  N-term Ac
  MOD_RES (4)..(4): Alpha-Me R8-octenyl-alanine olefin amino acid connected by an all-carbon crosslinker comprising one double bond
  misc_feature (4)..(11): Crosslink between residues
  MOD_RES (6)..(6): 4-carboxy Phe
  MOD_RES (7)..(7): 6cl-Trp
  MOD_RES (10)..(10): Cyclobutyl-Ala
  MOD_RES (11)..(11): Alpha-Me S5-pentenyl-alanine olefin amino acid connected by an all-carbon crosslinker comprising one double bond
  MOD_RES (15)..(15): D-amino acid
  C-term NH2
LTFAEFWAQAAAAIA

SEQ ID NO: 346 - protein, 17 aa, Artificial Sequence
  Description of Artificial Sequence: Synthetic peptide
  N-term Ac
  MOD_RES (4)..(4): Alpha-Me R8-octenyl-alanine olefin amino acid connected by an all-carbon crosslinker comprising one double bond
  misc_feature (4)..(11): Crosslink between residues
  MOD_RES (7)..(7): 6cl-Trp
  MOD_RES (11)..(11): Alpha-Me S5-pentenyl-alanine olefin amino acid connected by an all-carbon crosslinker comprising one double bond
  MOD_RES (17)..(17): D-amino acid
  C-term NH2
LTFAAYWAQLAAAAAAA

SEQ ID NO: 347 - protein, 17 aa, Artificial Sequence
  Description of Artificial Sequence: Synthetic peptide
  N-term Ac
  MOD_RES (4)..(4): Alpha-Me R8-octenyl-alanine olefin amino acid connected by an all-carbon crosslinker comprising one double bond
  misc_feature (4)..(11): Crosslink between residues
  MOD_RES (7)..(7): 6cl-Trp
  MOD_RES (11)..(11): Alpha-Me S5-pentenyl-alanine olefin amino acid connected by an all-carbon crosslinker comprising one double bond
  MOD_RES (17)..(17): D-amino acid
  C-term NH2
LTFAAYWAQLAAAAAAA

SEQ ID NO: 348 - protein, 16 aa, Artificial Sequence
  Description of Artificial Sequence: Synthetic peptide
  N-term Ac
  MOD_RES (2)..(2): Alpha-Me R8-octenyl-alanine olefin amino acid connected by an all-carbon crosslinker comprising one double bond
  misc_feature (2)..(4): Crosslink between residues
  MOD_RES (5)..(5): 6cl-Trp
  MOD_RES (16)..(16): D-amino acid
  C-term NH2
FAAYWEALAAAAAAAA

SEQ ID NO: 349 - protein, 17 aa, Artificial Sequence
  Description of Artificial Sequence: Synthetic peptide
  N-term Ac
  MOD_RES (4)..(4): Alpha-Me R8-octenyl-alanine olefin amino acid connected by an all-carbon crosslinker comprising one double bond
  misc_feature (4)..(11): Crosslink between residues
  MOD_RES (11)..(11): Alpha-Me S5-pentenyl-alanine olefin amino acid connected by an all-carbon crosslinker comprising one double bond
  MOD_RES (17)..(17): D-amino acid
  C-term NH2
ETFAEYWAQLAAAAAAA

SEQ ID NO: 350 - protein, 17 aa, Artificial Sequence
  Description of Artificial Sequence: Synthetic peptide
  N-term Ac
  MOD_RES (4)..(4): Alpha-Me R8-octenyl-alanine olefin amino acid connected by an all-carbon crosslinker comprising one double bond
  misc_feature (4)..(11): Crosslink between residues
  MOD_RES (11)..(11): Alpha-Me S5-pentenyl-alanine olefin amino acid connected by an all-carbon crosslinker comprising one double bond
  MOD_RES (17)..(17): D-amino acid
  C-term NH2
ETFAEYWAQLAAAAAAA

SEQ ID NO: 351 - protein, 18 aa, Artificial Sequence
  Description of Artificial Sequence: Synthetic peptide
  N-term Ac
  MOD_RES (4)..(4): Alpha-Me R8-octenyl-alanine olefin amino acid connected by an all-carbon crosslinker comprising one double bond
  misc_feature (4)..(11): Crosslink between residues
  MOD_RES (11)..(11): Alpha-Me S5-pentenyl-alanine olefin amino acid connected by an all-carbon crosslinker comprising one double bond
  MOD_RES (18)..(18): D-amino acid
  C-term NH2
LTFAEYWAQLAAAAAAAA

SEQ ID NO: 352 - protein, 18 aa, Artificial Sequence
  Description of Artificial Sequence: Synthetic peptide
  N-term Ac
  MOD_RES (4)..(4): Alpha-Me R8-octenyl-alanine olefin amino acid connected by an all-carbon crosslinker comprising one double bond
  misc_feature (4)..(11): Crosslink between residues
  MOD_RES (11)..(11): Alpha-Me S5-pentenyl-alanine olefin amino acid connected by an all-carbon crosslinker comprising one double bond
  MOD_RES (18)..(18): D-amino acid
  C-term NH2
LTFAEYWAQLAAAAAAAA

SEQ ID NO: 353 - protein, 17 aa, Artificial Sequence
  Description of Artificial Sequence: Synthetic peptide
  N-term Ac
  MOD_RES (4)..(4): Alpha-Me R8-octenyl-alanine olefin amino acid connected by an all-carbon crosslinker comprising one double bond
  misc_feature (4)..(11): Crosslink between residues
  MOD_RES (11)..(11): Alpha-Me S5-pentenyl-alanine olefin amino acid connected by an all-carbon crosslinker comprising one double bond
  MOD_RES (14)..(14): Norleucine
  MOD_RES (17)..(17): D-amino acid
  C-term NH2
LTFAAYWAQLAAALAAA

SEQ ID NO: 354 - protein, 17 aa, Artificial Sequence
  Description of Artificial Sequence: Synthetic peptide
  N-term Ac
  MOD_RES (4)..(4): Alpha-Me R8-octenyl-alanine olefin amino acid connected by an all-carbon crosslinker comprising one double bond
  misc_feature (4)..(11): Crosslink between residues
  MOD_RES (11)..(11): Alpha-Me S5-pentenyl-alanine olefin amino acid connected by an all-carbon crosslinker comprising one double bond
  MOD_RES (14)..(14): Norleucine
  MOD_RES (17)..(17): D-amino acid
  C-term NH2
LTFAAYWAQLAAALAAA

SEQ ID NO: 355 - protein, 17 aa, Artificial Sequence
  Description of Artificial Sequence: Synthetic peptide
  N-term Ac
  MOD_RES (4)..(4): Alpha-Me R8-octenyl-alanine olefin amino acid connected by an all-carbon crosslinker comprising one double bond
  misc_feature (4)..(11): Crosslink between residues
  MOD_RES (10)..(10): Cyclobutyl-Ala
  MOD_RES (11)..(11): Alpha-Me S5-pentenyl-alanine olefin amino acid connected by an all-carbon crosslinker comprising one double bond
  MOD_RES (17)..(17): D-amino acid
  C-term NH2
LTFAEYWAQAAAAAAAA

SEQ ID NO: 356 - protein, 17 aa, Artificial Sequence
  Description of Artificial Sequence: Synthetic peptide
  N-term Ac
  MOD_RES (4)..(4): Alpha-Me R8-octenyl-alanine olefin amino acid connected by an all-carbon crosslinker comprising one double bond
  misc_feature (4)..(11): Crosslink between residues
  MOD_RES (10)..(10): Cyclobutyl-Ala
  MOD_RES (11)..(11): Alpha-Me S5-pentenyl-alanine olefin amino acid connected by an all-carbon crosslinker comprising one double bond
  MOD_RES (17)..(17): D-amino acid
  C-term NH2
LTFAEYWAQAAAAAAAA

SEQ ID NO: 357 - protein, 17 aa, Artificial Sequence
  Description of Artificial Sequence: Synthetic peptide
  N-term Ac
  MOD_RES (4)..(4): Alpha-Me R8-octenyl-alanine olefin amino acid connected by an all-carbon crosslinker comprising one double bond
  misc_feature (4)..(11): Crosslink between residues
  MOD_RES (6)..(6): 4-carboxy Phe
  MOD_RES (10)..(10): Cyclobutyl-Ala
  MOD_RES (11)..(11): Alpha-Me S5-pentenyl-alanine olefin amino acid connected by an all-carbon crosslinker comprising one double bond
  MOD_RES (17)..(17): D-amino acid
  C-term NH2
LTFAEFWAQAAAAAAAA

SEQ ID NO: 358 - protein, 17 aa, Artificial Sequence
  Description of Artificial Sequence: Synthetic peptide
  N-term Ac
  MOD_RES (4)..(4): Alpha-Me R8-octenyl-alanine olefin amino acid connected by an all-carbon crosslinker comprising one double bond
  misc_feature (4)..(11): Crosslink between residues
  MOD_RES (6)..(6): 4-carboxy Phe
  MOD_RES (10)..(10): Cyclobutyl-Ala
  MOD_RES (11)..(11): Alpha-Me S5-pentenyl-alanine olefin amino acid connected by an all-carbon crosslinker comprising one double bond
  MOD_RES (17)..(17): D-amino acid
  C-term NH2
LTFAEFWAQAAAAAAAA

SEQ ID NO: 359 - protein, 17 aa, Artificial Sequence
  Description of Artificial Sequence: Synthetic peptide
  N-term Ac
  MOD_RES (4)..(4): Alpha-Me R8-octenyl-alanine olefin amino acid connected by an all-carbon crosslinker comprising one double bond
  misc_feature (4)..(11): Crosslink between residues
  MOD_RES (10)..(10): Cyclobutyl-Ala
  MOD_RES (11)..(11): Alpha-Me S5-pentenyl-alanine olefin amino acid connected by an all-carbon crosslinker comprising one double bond
  MOD_RES (17)..(17): D-amino acid
  C-term NH2
LTFAEYWSQAAAAAAAA

SEQ ID NO: 360 - protein, 17 aa, Artificial Sequence
  Description of Artificial Sequence: Synthetic peptide
  N-term Ac
  MOD_RES (4)..(4): Alpha-Me R8-octenyl-alanine olefin amino acid connected by an all-carbon crosslinker comprising one double bond
  misc_feature (4)..(11): Crosslink between residues
  MOD_RES (10)..(10): Cyclobutyl-Ala
  MOD_RES (11)..(11): Alpha-Me S5-pentenyl-alanine olefin amino acid connected by an all-carbon crosslinker comprising one double bond
  MOD_RES (17)..(17): D-amino acid
  C-term NH2
LTFAEYWSQAAAAAAAA

SEQ ID NO: 361 - protein, 15 aa, Artificial Sequence
  Description of Artificial Sequence: Synthetic peptide
  N-term Ac
  MOD_RES (4)..(4): Alpha-Me R8-octenyl-alanine olefin amino acid connected by an all-carbon crosslinker comprising one double bond
  misc_feature (4)..(11): Crosslink between residues
  MOD_RES (10)..(10): Cyclobutyl-Ala
  MOD_RES (11)..(11): Alpha-Me S5-pentenyl-alanine olefin amino acid connected by an all-carbon crosslinker comprising one double bond
  MOD_RES (15)..(15): D-amino acid
  C-term NH2
LTFAEYWAQAASAAA

SEQ ID NO: 362 - protein, 15 aa, Artificial Sequence
  Description of Artificial Sequence: Synthetic peptide
  N-term Ac
  MOD_RES (4)..(4): Alpha-Me R8-octenyl-alanine olefin amino acid connected by an all-carbon crosslinker comprising one double bond
  misc_feature (4)..(11): Crosslink between residues
  MOD_RES (10)..(10): Cyclobutyl-Ala
  MOD_RES (11)..(11): Alpha-Me S5-pentenyl-alanine olefin amino acid connected by an all-carbon crosslinker comprising one double bond
  MOD_RES (15)..(15): D-amino acid
  C-term NH2
LTFAEYWAQAASAAA

SEQ ID NO: 363 - protein, 16 aa, Artificial Sequence
  Description of Artificial Sequence: Synthetic peptide
  N-term Ac
  MOD_RES (5)..(5): Alpha-Me R8-octenyl-alanine olefin amino acid connected by an all-carbon crosslinker comprising one double bond
  misc_feature (5)..(12): Crosslink between residues
  MOD_RES (11)..(11): Cyclobutyl-Ala
  MOD_RES (12)..(12): Alpha-Me S5-pentenyl-alanine olefin amino acid connected by an all-carbon crosslinker comprising one double bond
  MOD_RES (16)..(16): D-amino acid
  C-term NH2
ALTFAEYWAQAASAAA

SEQ ID NO: 364 - protein, 16 aa, Artificial Sequence
  Description of Artificial Sequence: Synthetic peptide
  N-term Ac
  MOD_RES (5)..(5): Alpha-Me R8-octenyl-alanine olefin amino acid connected by an all-carbon crosslinker comprising one double bond
  misc_feature (5)..(12): Crosslink between residues
  MOD_RES (11)..(11): Cyclobutyl-Ala
  MOD_RES (12)..(12): Alpha-Me S5-pentenyl-alanine olefin amino acid connected by an all-carbon crosslinker comprising one double bond
  MOD_RES (16)..(16): D-amino acid
  C-term NH2
ALTFAEYWAQAASAAA

SEQ ID NO: 365 - protein, 17 aa, Artificial Sequence
  Description of Artificial Sequence: Synthetic peptide
  N-term Ac
  MOD_RES (5)..(5): Alpha-Me R8-octenyl-alanine olefin amino acid connected by an all-carbon crosslinker comprising one double bond
  misc_feature (5)..(12): Crosslink between residues
  MOD_RES (11)..(11): Cyclobutyl-Ala
  MOD_RES (12)..(12): Alpha-Me S5-pentenyl-alanine olefin amino acid connected by an all-carbon crosslinker comprising one double bond
  MOD_RES (17)..(17): D-amino acid
  C-term NH2
ALTFAEYWAQAASAAAA

SEQ ID NO: 366 - protein, 17 aa, Artificial Sequence
  Description of Artificial Sequence: Synthetic peptide
  N-term Ac
  MOD_RES (5)..(5): Alpha-Me R8-octenyl-alanine olefin amino acid connected by an all-carbon crosslinker comprising one double bond
  misc_feature (5)..(12): Crosslink between residues
  MOD_RES (11)..(11): Cyclobutyl-Ala
  MOD_RES (12)..(12): Alpha-Me S5-pentenyl-alanine olefin amino acid connected by an all-carbon crosslinker comprising one double bond
  MOD_RES (17)..(17): D-amino acid
  C-term NH2
ALTFAEYWAQAASAAAA

SEQ ID NO: 367 - protein, 18 aa, Artificial Sequence
  Description of Artificial Sequence: Synthetic peptide
  N-term Ac
  MOD_RES (6)..(6): Alpha-Me R8-octenyl-alanine olefin amino acid connected by an all-carbon crosslinker comprising one double bond
  misc_feature (6)..(13): Crosslink between residues
  MOD_RES (12)..(12): Cyclobutyl-Ala
  MOD_RES (13)..(13): Alpha-Me S5-pentenyl-alanine olefin amino acid connected by an all-carbon crosslinker comprising one double bond
  MOD_RES (18)..(18): D-amino acid
  C-term NH2
AALTFAEYWAQAASAAAA

SEQ ID NO: 368 - protein, 18 aa, Artificial Sequence
  Description of Artificial Sequence: Synthetic peptide
  N-term Ac
  MOD_RES (6)..(6): Alpha-Me R8-octenyl-alanine olefin amino acid connected by an all-carbon crosslinker comprising one double bond
  misc_feature (6)..(13): Crosslink between residues
  MOD_RES (12)..(12): Cyclobutyl-Ala
  MOD_RES (13)..(13): Alpha-Me S5-pentenyl-alanine olefin amino acid connected by an all-carbon crosslinker comprising one double bond
  MOD_RES (18)..(18): D-amino acid
  C-term NH2
AALTFAEYWAQAASAAAA

SEQ ID NO: 369 - protein, 14 aa, Artificial Sequence
  Description of Artificial Sequence: Synthetic peptide
  N-term Ac
  MOD_RES (4)..(4): Alpha-Me R8-octenyl-alanine olefin amino acid connected by an all-carbon crosslinker comprising one double bond
  misc_feature (4)..(11): Crosslink between residues
  MOD_RES (10)..(10): Cyclobutyl-Ala
  MOD_RES (11)..(11): Alpha-Me S5-pentenyl-alanine olefin amino acid connected by an all-carbon crosslinker comprising one double bond
  C-term NH2
RTFAEYWAQAASAA

SEQ ID NO: 370 - protein, 14 aa, Artificial Sequence
  Description of Artificial Sequence: Synthetic peptide
  N-term Ac
  MOD_RES (4)..(4): Alpha-Me R8-octenyl-alanine olefin amino acid connected by an all-carbon crosslinker comprising one double bond
  misc_feature (4)..(11): Crosslink between residues
  MOD_RES (10)..(10): Cyclobutyl-Ala
  MOD_RES (11)..(11): Alpha-Me S5-pentenyl-alanine olefin amino acid connected by an all-carbon crosslinker comprising one double bond
  C-term NH2
LRFAEYWAQAASAA

SEQ ID NO: 371 - protein, 14 aa, Artificial Sequence
  Description of Artificial Sequence: Synthetic peptide
  N-term Ac
  MOD_RES (4)..(4): Alpha-Me R8-octenyl-alanine olefin amino acid connected by an all-carbon crosslinker comprising one double bond
  misc_feature (4)..(11): Crosslink between residues
  MOD_RES (10)..(10): Cyclobutyl-Ala
  MOD_RES (11)..(11): Alpha-Me S5-pentenyl-alanine olefin amino acid connected by an all-carbon crosslinker comprising one double bond
  C-term NH2
LTFAEYWRQAASAA

SEQ ID NO: 372 - protein, 14 aa, Artificial Sequence
  Description of Artificial Sequence: Synthetic peptide
  N-term Ac
  MOD_RES (4)..(4): Alpha-Me R8-octenyl-alanine olefin amino acid connected by an all-carbon crosslinker comprising one double bond
  misc_feature (4)..(11): Crosslink between residues
  MOD_RES (10)..(10): Cyclobutyl-Ala
  MOD_RES (11)..(11): Alpha-Me S5-pentenyl-alanine olefin amino acid connected by an all-carbon crosslinker comprising one double bond
  C-term NH2
LTFAEYWARAASAA

SEQ ID NO: 373 - protein, 14 aa, Artificial Sequence
  Description of Artificial Sequence: Synthetic peptide
  N-term Ac
  MOD_RES (4)..(4): Alpha-Me R8-octenyl-alanine olefin amino acid connected by an all-carbon crosslinker comprising one double bond
  misc_feature (4)..(11): Crosslink between residues
  MOD_RES (10)..(10): Cyclobutyl-Ala
  MOD_RES (11)..(11): Alpha-Me S5-pentenyl-alanine olefin amino acid connected by an all-carbon crosslinker comprising one double bond
  C-term NH2
LTFAEYWAQAARAA

SEQ ID NO: 374 - protein, 14 aa, Artificial Sequence
  Description of Artificial Sequence: Synthetic peptide
  N-term Ac
  MOD_RES (4)..(4): Alpha-Me R8-octenyl-alanine olefin amino acid connected by an all-carbon crosslinker comprising one double bond
  misc_feature (4)..(11): Crosslink between residues
  MOD_RES (10)..(10): Cyclobutyl-Ala
  MOD_RES (11)..(11): Alpha-Me S5-pentenyl-alanine olefin amino acid connected by an all-carbon crosslinker comprising one double bond
  C-term NH2
LTFAEYWAQAASRA

SEQ ID NO: 375 - protein, 14 aa, Artificial Sequence
  Description of Artificial Sequence: Synthetic peptide
  N-term Ac
  MOD_RES (4)..(4): Alpha-Me R8-octenyl-alanine olefin amino acid connected by an all-carbon crosslinker comprising one double bond
  misc_feature (4)..(11): Crosslink between residues
  MOD_RES (10)..(10): Cyclobutyl-Ala
  MOD_RES (11)..(11): Alpha-Me S5-pentenyl-alanine olefin amino acid connected by an all-carbon crosslinker comprising one double bond
  C-term NH2
LTFAEYWAQAASAR

SEQ ID NO: 376 - protein, 15 aa, Artificial Sequence
  Description of Artificial Sequence: Synthetic peptide
  N-term 5-FAM
  MOD_RES (1)..(1): Beta-Ala
  MOD_RES (5)..(5): Alpha-Me R8-octenyl-alanine olefin amino acid connected by an all-carbon crosslinker comprising one double bond
  misc_feature (5)..(12): Crosslink between residues
  MOD_RES (11)..(11): Cyclobutyl-Ala
  MOD_RES (12)..(12): Alpha-Me S5-pentenyl-alanine olefin amino acid connected by an all-carbon crosslinker comprising one double bond
  C-term NH2
ALTFAEYWAQAASAA

SEQ ID NO: 377 - protein, 16 aa, Artificial Sequence
  Description of Artificial Sequence: Synthetic peptide
  N-term 5-FAM
  MOD_RES (1)..(1): Beta-Ala
  MOD_RES (5)..(5): Alpha-Me R8-octenyl-alanine olefin amino acid connected by an all-carbon crosslinker comprising one double bond
  misc_feature (5)..(12): Crosslink between residues
  MOD_RES (12)..(12): Alpha-Me S5-pentenyl-alanine olefin amino acid connected by an all-carbon crosslinker comprising one double bond
  MOD_RES (15)..(15): Norleucine
  C-term NH2
ALTFAAYWAQLAAALA

SEQ ID NO: 378 - protein, 15 aa, Artificial Sequence
  Description of Artificial Sequence: Synthetic peptide
  N-term Ac
  MOD_RES (4)..(4): Alpha-Me R8-octenyl-alanine olefin amino acid connected by an all-carbon crosslinker comprising one double bond
  misc_feature (4)..(11): Crosslink between residues
  MOD_RES (11)..(11): Alpha-Me S5-pentenyl-alanine olefin amino acid connected by an all-carbon crosslinker comprising one double bond
  MOD_RES (14)..(14): Norleucine
  C-term NH2
LAFAEYWAQLAAALA

SEQ ID NO: 379 - protein, 15 aa, Artificial Sequence
  Description of Artificial Sequence: Synthetic peptide
  N-term Ac
  MOD_RES (4)..(4): Alpha-Me R8-octenyl-alanine olefin amino acid connected by an all-carbon crosslinker comprising one double bond
  misc_feature (4)..(11): Crosslink between residues
  MOD_RES (11)..(11): Alpha-Me S5-pentenyl-alanine olefin amino acid connected by an all-carbon crosslinker comprising one double bond
  MOD_RES (14)..(14): Norleucine
  C-term NH2
ATFAEYWAQLAAALA

SEQ ID NO: 380 - protein, 15 aa, Artificial Sequence
  Description of Artificial Sequence: Synthetic peptide
  N-term Ac
  MOD_RES (4)..(4): Alpha-Me R8-octenyl-alanine olefin amino acid connected by an all-carbon crosslinker comprising one double bond
  misc_feature (4)..(11): Crosslink between residues
  MOD_RES (11)..(11): Alpha-Me S5-pentenyl-alanine olefin amino acid connected by an all-carbon crosslinker comprising one double bond
  MOD_RES (14)..(14): Norleucine
  C-term NH2
AAFAEYWAQLAAALA

SEQ ID NO: 381 - protein, 16 aa, Artificial Sequence
  Description of Artificial Sequence: Synthetic peptide
  N-term Ac
  MOD_RES (5)..(5): Alpha-Me R8-octenyl-alanine olefin amino acid connected by an all-carbon crosslinker comprising one double bond
  misc_feature (5)..(12): Crosslink between residues
  MOD_RES (12)..(12): Alpha-Me S5-pentenyl-alanine olefin amino acid connected by an all-carbon crosslinker comprising one double bond
  MOD_RES (15)..(15): Norleucine
  C-term NH2
AAAFAEYWAQLAAALA

SEQ ID NO: 382 - protein, 17 aa, Artificial Sequence
  Description of Artificial Sequence: Synthetic peptide
  N-term Ac
  MOD_RES (6)..(6): Alpha-Me R8-octenyl-alanine olefin amino acid connected by an all-carbon crosslinker comprising one double bond
  misc_feature (6)..(13): Crosslink between residues
  MOD_RES (13)..(13): Alpha-Me S5-pentenyl-alanine olefin amino acid connected by an all-carbon crosslinker comprising one double bond
  MOD_RES (16)..(16): Norleucine
  C-term NH2
AAAAFAEYWAQLAAALA

SEQ ID NO: 383 - protein, 16 aa, Artificial Sequence
  Description of Artificial Sequence: Synthetic peptide
  N-term Ac
  MOD_RES (5)..(5): Alpha-Me R8-octenyl-alanine olefin amino acid connected by an all-carbon crosslinker comprising one double bond
  misc_feature (5)..(12): Crosslink between residues
  MOD_RES (12)..(12): Alpha-Me S5-pentenyl-alanine olefin amino acid connected by an all-carbon crosslinker comprising one double bond
  MOD_RES (15)..(15): Norleucine
  C-term NH2
AATFAEYWAQLAAALA

SEQ ID NO: 384 - protein, 17 aa, Artificial Sequence
  Description of Artificial Sequence: Synthetic peptide
  N-term Ac
  MOD_RES (6)..(6): Alpha-Me R8-octenyl-alanine olefin amino acid connected by an all-carbon crosslinker comprising one double bond
  misc_feature (6)..(13): Crosslink between residues
  MOD_RES (13)..(13): Alpha-Me S5-pentenyl-alanine olefin amino acid connected by an all-carbon crosslinker comprising one double bond
  MOD_RES (16)..(16): Norleucine
  C-term NH2
AALTFAEYWAQLAAALA

SEQ ID NO: 385 - protein, 18 aa, Artificial Sequence
  Description of Artificial Sequence: Synthetic peptide
  N-term Ac
  MOD_RES (7)..(7): Alpha-Me R8-octenyl-alanine olefin amino acid connected by an all-carbon crosslinker comprising one double bond
  misc_feature (7)..(14): Crosslink between residues
  MOD_RES (14)..(14): Alpha-Me S5-pentenyl-alanine olefin amino acid connected by an all-carbon crosslinker comprising one double bond
  MOD_RES (17)..(17): Norleucine
  C-term NH2
AAALTFAEYWAQLAAALA

SEQ ID NO: 386 - protein, 16 aa, Artificial Sequence
  Description of Artificial Sequence: Synthetic peptide
  N-term Ac
  MOD_RES (4)..(4): Alpha-Me R8-octenyl-alanine olefin amino acid connected by an all-carbon crosslinker comprising one double bond
  misc_feature (4)..(11): Crosslink between residues
  MOD_RES (11)..(11): Alpha-Me S5-pentenyl-alanine olefin amino acid connected by an all-carbon crosslinker comprising one double bond
  MOD_RES (14)..(14): Norleucine
  C-term NH2
LTFAEYWAQLAAALAA

SEQ ID NO: 387 - protein, 17 aa, Artificial Sequence
  Description of Artificial Sequence: Synthetic peptide
  N-term Ac
  MOD_RES (5)..(5): Alpha-Me R8-octenyl-alanine olefin amino acid connected by an all-carbon crosslinker comprising one double bond
  misc_feature (5)..(12): Crosslink between residues
  MOD_RES (12)..(12): Alpha-Me S5-pentenyl-alanine olefin amino acid connected by an all-carbon crosslinker comprising one double bond
  MOD_RES (15)..(15): Norleucine
  C-term NH2
ALTFAEYWAQLAAALAA

SEQ ID NO: 388 - protein, 18 aa, Artificial Sequence
  Description of Artificial Sequence: Synthetic peptide
  N-term Ac
  MOD_RES (6)..(6): Alpha-Me R8-octenyl-alanine olefin amino acid connected by an all-carbon crosslinker comprising one double bond
  misc_feature (6)..(13): Crosslink between residues
  MOD_RES (13)..(13): Alpha-Me S5-pentenyl-alanine olefin amino acid connected by an all-carbon crosslinker comprising one double bond
  MOD_RES (16)..(16): Norleucine
  C-term NH2
AALTFAEYWAQLAAALAA

SEQ ID NO: 389 - protein, 16 aa, Artificial Sequence
  Description of Artificial Sequence: Synthetic peptide
  N-term Ac
  MOD_RES (4)..(4): Alpha-Me R8-octenyl-alanine olefin amino acid connected by an all-carbon crosslinker comprising one double bond
  misc_feature (4)..(11): Crosslink between residues
  MOD_RES (10)..(10): Cyclobutyl-Ala
  MOD_RES (11)..(11): Alpha-Me S5-pentenyl-alanine olefin amino acid connected by an all-carbon crosslinker comprising one double bond
  MOD_RES (14)..(14): Norleucine
  C-term NH2
LTFAEYWAQAAAALAA

SEQ ID NO: 390 - protein, 16 aa, Artificial Sequence
  Description of Artificial Sequence: Synthetic peptide
  N-term Ac
  MOD_RES (4)..(4): Alpha-Me R8-octenyl-alanine olefin amino acid connected by an all-carbon crosslinker comprising one double bond
  misc_feature (4)..(11): Crosslink between residues
  MOD_RES (10)..(10): hLeu
  MOD_RES (11)..(11): Alpha-Me S5-pentenyl-alanine olefin amino acid connected by an all-carbon crosslinker comprising one double bond
  MOD_RES (14)..(14): Norleucine
  C-term NH2
LTFAEYWAQLAAALAA

SEQ ID NO: 391 - protein, 17 aa, Artificial Sequence
  Description of Artificial Sequence: Synthetic peptide
  N-term Ac
  MOD_RES (5)..(5): Alpha-Me R8-octenyl-alanine olefin amino acid connected by an all-carbon crosslinker comprising one double bond
  misc_feature (5)..(12): Crosslink between residues
  MOD_RES (11)..(11): hLeu
  MOD_RES (12)..(12): Alpha-Me S5-pentenyl-alanine olefin amino acid connected by an all-carbon crosslinker comprising one double bond
  MOD_RES (15)..(15): Norleucine
  C-term NH2
ALTFAEYWAQLAAALAA

SEQ ID NO: 392 - protein, 15 aa, Artificial Sequence
  Description of Artificial Sequence: Synthetic peptide
  N-term Ac
  MOD_RES (4)..(4): Alpha-Me R8-octenyl-alanine olefin amino acid connected by an all-carbon crosslinker comprising one double bond
  misc_feature (4)..(11): Crosslink between residues
  MOD_RES (6)..(6): N-methyl-Tyr
  MOD_RES (11)..(11): Alpha-Me S5-pentenyl-alanine olefin amino acid connected by an all-carbon crosslinker comprising one double bond
  MOD_RES (14)..(14): Norleucine
  C-term NH2
LTFAAYWAQLAAALA

SEQ ID NO: 393 - protein, 15 aa, Artificial Sequence
  Description of Artificial Sequence: Synthetic peptide
  N-term Ac
  MOD_RES (4)..(4): Alpha-Me R8-octenyl-alanine olefin amino acid connected by an all-carbon crosslinker comprising one double bond
  misc_feature (4)..(11): Crosslink between residues
  MOD_RES (6)..(6): N-methyl-Tyr
  MOD_RES (11)..(11): Alpha-Me S5-pentenyl-alanine olefin amino acid connected by an all-carbon crosslinker comprising one double bond
  MOD_RES (14)..(14): Norleucine
  C-term NH2
LTFAAYWAQLAAALA

SEQ ID NO: 394 - protein, 15 aa, Artificial Sequence
  Description of Artificial Sequence: Synthetic peptide
  N-term Ac
  MOD_RES (4)..(4): Alpha-Me R8-octenyl-alanine olefin amino acid connected by an all-carbon crosslinker comprising one double bond
  misc_feature (4)..(11): Crosslink between residues
  MOD_RES (7)..(7): N-methyl-Trp
  MOD_RES (11)..(11): Alpha-Me S5-pentenyl-alanine olefin amino acid connected by an all-carbon crosslinker comprising one double bond
  MOD_RES (14)..(14): Norleucine
  C-term NH2
LTFAAYWAQLAAALA

SEQ ID NO: 395 - protein, 15 aa, Artificial Sequence
  Description of Artificial Sequence: Synthetic peptide
  N-term Ac
  MOD_RES (4)..(4): Alpha-Me R8-octenyl-alanine olefin amino acid connected by an all-carbon crosslinker comprising one double bond
  misc_feature (4)..(11): Crosslink between residues
  MOD_RES (7)..(7): N-methyl-Trp
  MOD_RES (11)..(11): Alpha-Me S5-pentenyl-alanine olefin amino acid connected by an all-carbon crosslinker comprising one double bond
  MOD_RES (14)..(14): Norleucine
  C-term NH2
LTFAAYWAQLAAALA

SEQ ID NO: 396 - protein, 15 aa, Artificial Sequence
  Description of Artificial Sequence: Synthetic peptide
  N-term Ac
  MOD_RES (4)..(4): Alpha-Me R8-octenyl-alanine olefin amino acid connected by an all-carbon crosslinker comprising one double bond
  misc_feature (4)..(11): Crosslink between residues
  MOD_RES (7)..(7): Alpha-Me-Trp
  MOD_RES (11)..(11): Alpha-Me S5-pentenyl-alanine olefin amino acid connected by an all-carbon crosslinker comprising one double bond
  MOD_RES (14)..(14): Norleucine
  C-term NH2
LTFAAYWAQLAAALA

SEQ ID NO: 397 - protein, 15 aa, Artificial Sequence
  Description of Artificial Sequence: Synthetic peptide
  N-term Ac
  MOD_RES (4)..(4): Alpha-Me R8-octenyl-alanine olefin amino acid connected by an all-carbon crosslinker comprising one double bond
  misc_feature (4)..(11): Crosslink between residues
  MOD_RES (7)..(7): Alpha-Me-Trp
  MOD_RES (11)..(11): Alpha-Me S5-pentenyl-alanine olefin amino acid connected by an all-carbon crosslinker comprising one double bond
  MOD_RES (14)..(14): Norleucine
  C-term NH2
LTFAAYWAQLAAALA

SEQ ID NO: 398 - protein, 15 aa, Artificial Sequence
  Description of Artificial Sequence: Synthetic peptide
  N-term Ac
  MOD_RES (4)..(4): Alpha-Me R8-octenyl-alanine olefin amino acid connected by an all-carbon crosslinker comprising one double bond
  misc_feature (4)..(11): Crosslink between residues
  MOD_RES (8)..(8): 2-aminoisobutyric acid
  MOD_RES (11)..(11): Alpha-Me S5-pentenyl-alanine olefin amino acid connected by an all-carbon crosslinker comprising one double bond
  MOD_RES (14)..(14): Norleucine
  C-term NH2
LTFAAYWXQLAAALA

SEQ ID NO: 399 - protein, 15 aa, Artificial Sequence
  Description of Artificial Sequence: Synthetic peptide
  N-term Ac
  MOD_RES (4)..(4): Alpha-Me R8-octenyl-alanine olefin amino acid connected by an all-carbon crosslinker comprising one double bond
  misc_feature (4)..(11): Crosslink between residues
  MOD_RES (8)..(8): 2-aminoisobutyric acid
  MOD_RES (11)..(11): Alpha-Me S5-pentenyl-alanine olefin amino acid connected by an all-carbon crosslinker comprising one double bond
  MOD_RES (14)..(14): Norleucine
  C-term NH2
LTFAAYWXQLAAALA

SEQ ID NO: 400 - protein, 15 aa, Artificial Sequence
  Description of Artificial Sequence: Synthetic peptide
  N-term Ac
  MOD_RES (4)..(4): Alpha-Me R8-octenyl-alanine olefin amino acid connected by an all-carbon crosslinker comprising one double bond
  misc_feature (4)..(11): Crosslink between residues
  MOD_RES (11)..(11): Alpha-Me S5-pentenyl-alanine olefin amino acid connected by an all-carbon crosslinker comprising one double bond
  MOD_RES (13)..(13): 2-aminoisobutyric acid
  MOD_RES (14)..(14): Norleucine
  C-term NH2
LTFAAYWAQLAAXLA

SEQ ID NO: 401 - protein, 15 aa, Artificial Sequence
  Description of Artificial Sequence: Synthetic peptide
  N-term Ac
  MOD_RES (4)..(4): Alpha-Me R8-octenyl-alanine olefin amino acid connected by an all-carbon crosslinker comprising one double bond
  misc_feature (4)..(11): Crosslink between residues
  MOD_RES (11)..(11): Alpha-Me S5-pentenyl-alanine olefin amino acid connected by an all-carbon crosslinker comprising one double bond
  MOD_RES (13)..(13): 2-aminoisobutyric acid
  MOD_RES (14)..(14): Norleucine
  C-term NH2
LTFAAYWAQLAAXLA

SEQ ID NO: 402 - protein, 15 aa, Artificial Sequence
  Description of Artificial Sequence: Synthetic peptide
  N-term Ac
  MOD_RES (4)..(4): Alpha-Me R8-octenyl-alanine olefin amino acid connected by an all-carbon crosslinker comprising one double bond
  misc_feature (4)..(11): Crosslink between residues
  MOD_RES (11)..(11): Alpha-Me S5-pentenyl-alanine olefin amino acid connected by an all-carbon crosslinker comprising one double bond
  MOD_RES (13)..(13): D-amino acid
  MOD_RES (14)..(14): Norleucine
  C-term NH2
LTFAAYWAQLAAALA

SEQ ID NO: 403 - protein, 15 aa, Artificial Sequence
  Description of Artificial Sequence: Synthetic peptide
  N-term Ac
  MOD_RES (4)..(4): Alpha-Me R8-octenyl-alanine olefin amino acid connected by an all-carbon crosslinker comprising one double bond
  misc_feature (4)..(11): Crosslink between residues
  MOD_RES (11)..(11): Alpha-Me S5-pentenyl-alanine olefin amino acid connected by an all-carbon crosslinker comprising one double bond
  MOD_RES (13)..(13): D-amino acid
  MOD_RES (14)..(14): Norleucine
  C-term NH2
LTFAAYWAQLAAALA

SEQ ID NO: 404 - protein, 15 aa, Artificial Sequence
  Description of Artificial Sequence: Synthetic peptide
  N-term Ac
  MOD_RES (4)..(4): Alpha-Me R8-octenyl-alanine olefin amino acid connected by an all-carbon crosslinker comprising one double bond
  misc_feature (4)..(11): Crosslink between residues
  MOD_RES (11)..(11): Alpha-Me S5-pentenyl-alanine olefin amino acid connected by an all-carbon crosslinker comprising one double bond
  MOD_RES (13)..(13): Sarcosine
  MOD_RES (14)..(14): Norleucine
  C-term NH2
LTFAAYWAQLAAXLA

SEQ ID NO: 405 - protein, 15 aa, Artificial Sequence
  Description of Artificial Sequence: Synthetic peptide
  N-term Ac
  MOD_RES (4)..(4): Alpha-Me R8-octenyl-alanine olefin amino acid connected by an all-carbon crosslinker comprising one double bond
  misc_feature (4)..(11): Crosslink between residues
  MOD_RES (11)..(11): Alpha-Me S5-pentenyl-alanine olefin amino acid connected by an all-carbon crosslinker comprising one double bond
  MOD_RES (13)..(13): Sarcosine
  MOD_RES (14)..(14): Norleucine
  C-term NH2
LTFAAYWAQLAAXLA

SEQ ID NO: 406 - protein, 15 aa, Artificial Sequence
  Description of Artificial Sequence: Synthetic peptide
  N-term Ac
  MOD_RES (4)..(4): Alpha-Me R8-octenyl-alanine olefin amino acid connected by an all-carbon crosslinker comprising one double bond
  misc_feature (4)..(11): Crosslink between residues
  MOD_RES (11)..(11): Alpha-Me S5-pentenyl-alanine olefin amino acid connected by an all-carbon crosslinker comprising one double bond
  MOD_RES (14)..(14): Norleucine
  MOD_RES (15)..(15): 2-aminoisobutyric acid
  C-term NH2
LTFAAYWAQLAAALX

SEQ ID NO: 407 - protein, 15 aa, Artificial Sequence
  Description of Artificial Sequence: Synthetic peptide
  N-term Ac
  MOD_RES (4)..(4): Alpha-Me R8-octenyl-alanine olefin amino acid connected by an all-carbon crosslinker comprising one double bond
  misc_feature (4)..(11): Crosslink between residues
  MOD_RES (11)..(11): Alpha-Me S5-pentenyl-alanine olefin amino acid connected by an all-carbon crosslinker comprising one double bond
  MOD_RES (14)..(14): Norleucine
  MOD_RES (15)..(15): 2-aminoisobutyric acid
  C-term NH2
LTFAAYWAQLAAALX

SEQ ID NO: 408 - protein, 15 aa, Artificial Sequence
  Description of Artificial Sequence: Synthetic peptide
  N-term Ac
  MOD_RES (4)..(4): Alpha-Me R8-octenyl-alanine olefin amino acid connected by an all-carbon crosslinker comprising one double bond
  misc_feature (4)..(11): Crosslink between residues
  MOD_RES (11)..(11): Alpha-Me S5-pentenyl-alanine olefin amino acid connected by an all-carbon crosslinker comprising one double bond
  MOD_RES (14)..(14): Norleucine
  MOD_RES (15)..(15): N-methyl-Ala
  C-term NH2
LTFAAYWAQLAAALA

SEQ ID NO: 409 - protein, 15 aa, Artificial Sequence
  Description of Artificial Sequence: Synthetic peptide
  N-term Ac
  MOD_RES (4)..(4): Alpha-Me R8-octenyl-alanine olefin amino acid connected by an all-carbon crosslinker comprising one double bond
  misc_feature (4)..(11): Crosslink between residues
  MOD_RES (11)..(11): Alpha-Me S5-pentenyl-alanine olefin amino acid connected by an all-carbon crosslinker comprising one double bond
  MOD_RES (14)..(14): Norleucine
  MOD_RES (15)..(15): N-methyl-Ala
  C-term NH2
LTFAAYWAQLAAALA

SEQ ID NO: 410 - protein, 15 aa, Artificial Sequence
  Description of Artificial Sequence: Synthetic peptide
  N-term Ac
  MOD_RES (4)..(4): Alpha-Me R8-octenyl-alanine olefin amino acid connected by an all-carbon crosslinker comprising one double bond
  misc_feature (4)..(11): Crosslink between residues
  MOD_RES (11)..(11): Alpha-Me S5-pentenyl-alanine olefin amino acid connected by an all-carbon crosslinker comprising one double bond
  MOD_RES (14)..(14): Norleucine
  MOD_RES (15)..(15): Sarcosine
  C-term NH2
LTFAAYWAQLAAALX

SEQ ID NO: 411 - protein, 15 aa, Artificial Sequence
  Description of Artificial Sequence: Synthetic peptide
  N-term Ac
  MOD_RES (4)..(4): Alpha-Me R8-octenyl-alanine olefin amino acid connected by an all-carbon crosslinker comprising one double bond
  misc_feature (4)..(11): Crosslink between residues
  MOD_RES (11)..(11): Alpha-Me S5-pentenyl-alanine olefin amino acid connected by an all-carbon crosslinker comprising one double bond
  MOD_RES (14)..(14): Norleucine
  MOD_RES (15)..(15): Sarcosine
  C-term NH2
LTFAAYWAQLAAALX

SEQ ID NO: 412 - protein, 16 aa, Artificial Sequence
  Description of Artificial Sequence: Synthetic peptide
  N-term Ac
  MOD_RES (4)..(4): Alpha-Me R8-octenyl-alanine olefin amino acid connected by an all-carbon crosslinker comprising one double bond
  misc_feature (4)..(11): Crosslink between residues
  MOD_RES (11)..(11): Alpha-Me S5-pentenyl-alanine olefin amino acid connected by an all-carbon crosslinker comprising one double bond
  MOD_RES (14)..(14): Norleucine
  MOD_RES (16)..(16): 2-aminoisobutyric acid
  C-term NH2
LTFAAYWAQLAAALAX

SEQ ID NO: 413 - protein, 16 aa, Artificial Sequence
  Description of Artificial Sequence: Synthetic peptide
  N-term Ac
  MOD_RES (4)..(4): Alpha-Me R8-octenyl-alanine olefin amino acid connected by an all-carbon crosslinker comprising one double bond
  misc_feature (4)..(11): Crosslink between residues
  MOD_RES (11)..(11): Alpha-Me S5-pentenyl-alanine olefin amino acid connected by an all-carbon crosslinker comprising one double bond
  MOD_RES (14)..(14): Norleucine
  MOD_RES (16)..(16): 2-aminoisobutyric acid
  C-term NH2
LTFAAYWAQLAAALAX

SEQ ID NO: 414 - protein, 16 aa, Artificial Sequence
  Description of Artificial Sequence: Synthetic peptide
  N-term Ac
  MOD_RES (4)..(4): Alpha-Me R8-octenyl-alanine olefin amino acid connected by an all-carbon crosslinker comprising one double bond
  misc_feature (4)..(11): Crosslink between residues
  MOD_RES (11)..(11): Alpha-Me S5-pentenyl-alanine olefin amino acid connected by an all-carbon crosslinker comprising one double bond
  MOD_RES (14)..(14): Norleucine
  MOD_RES (16)..(16): N-methyl-Ala
  C-term NH2
LTFAAYWAQLAAALAA

SEQ ID NO: 415 - protein, 16 aa, Artificial Sequence
  Description of Artificial Sequence: Synthetic peptide
  N-term Ac
  MOD_RES (4)..(4): Alpha-Me R8-octenyl-alanine olefin amino acid connected by an all-carbon crosslinker comprising one double bond
  misc_feature (4)..(11): Crosslink between residues
  MOD_RES (11)..(11): Alpha-Me S5-pentenyl-alanine olefin amino acid connected by an all-carbon crosslinker comprising one double bond
  MOD_RES (14)..(14): Norleucine
  MOD_RES (16)..(16): N-methyl-Ala
  C-term NH2
LTFAAYWAQLAAALAA

SEQ ID NO: 416 - protein, 16 aa, Artificial Sequence
  Description of Artificial Sequence: Synthetic peptide
  N-term Ac
  MOD_RES (4)..(4): Alpha-Me R8-octenyl-alanine olefin amino acid connected by an all-carbon crosslinker comprising one double bond
  misc_feature (4)..(11): Crosslink between residues
  MOD_RES (11)..(11): Alpha-Me S5-pentenyl-alanine olefin amino acid connected by an all-carbon crosslinker comprising one double bond
  MOD_RES (14)..(14): Norleucine
  MOD_RES (16)..(16): D-amino acid
  C-term NH2
LTFAAYWAQLAAALAA

SEQ ID NO: 417 - protein, 16 aa, Artificial Sequence
  Description of Artificial Sequence: Synthetic peptide
  N-term Ac
  MOD_RES (4)..(4): Alpha-Me R8-octenyl-alanine olefin amino acid connected by an all-carbon crosslinker comprising one double bond
  misc_feature (4)..(11): Crosslink between residues
  MOD_RES (11)..(11): Alpha-Me S5-pentenyl-alanine olefin amino acid connected by an all-carbon crosslinker comprising one double bond
  MOD_RES (14)..(14): Norleucine
  MOD_RES (16)..(16): D-amino acid
  C-term NH2
LTFAAYWAQLAAALAA

SEQ ID NO: 418 - protein, 16 aa, Artificial Sequence
  Description of Artificial Sequence: Synthetic peptide
  N-term Ac
  MOD_RES (4)..(4): Alpha-Me R8-octenyl-alanine olefin amino acid connected by an all-carbon crosslinker comprising one double bond
  misc_feature (4)..(11): Crosslink between residues
  MOD_RES (11)..(11): Alpha-Me S5-pentenyl-alanine olefin amino acid connected by an all-carbon crosslinker comprising one double bond
  MOD_RES (14)..(14): Norleucine
  MOD_RES (16)..(16): Sarcosine
  C-term NH2
LTFAAYWAQLAAALAX

SEQ ID NO: 419 - protein, 16 aa, Artificial Sequence
  Description of Artificial Sequence: Synthetic peptide
  N-term Ac
  MOD_RES (4)..(4): Alpha-Me R8-octenyl-alanine olefin amino acid connected by an all-carbon crosslinker comprising one double bond
  misc_feature (4)..(11): Crosslink between residues
  MOD_RES (11)..(11): Alpha-Me S5-pentenyl-alanine olefin amino acid connected by an all-carbon crosslinker comprising one double bond
  MOD_RES (14)..(14): Norleucine
  MOD_RES (16)..(16): Sarcosine
  C-term NH2
LTFAAYWAQLAAALAX

SEQ ID NO: 420 - protein, 15 aa, Artificial Sequence
  Description of Artificial Sequence: Synthetic peptide
  N-term Ac
  MOD_RES (4)..(4): Alpha-Me R8-octenyl-alanine olefin amino acid that is not connected by a crosslinker
  MOD_RES (11)..(11): Alpha-Me S5-pentenyl-alanine olefin amino acid that is not connected by a crosslinker
  MOD_RES (14)..(14): Norleucine
  C-term NH2
LTFAAYWAQLAAALA

SEQ ID NO: 421 - protein, 15 aa, Artificial Sequence
  Description of Artificial Sequence: Synthetic peptide
  N-term Ac
  MOD_RES (4)..(4): 2-aminoisobutyric acid
  MOD_RES (11)..(11): 2-aminoisobutyric acid
  MOD_RES (14)..(14): Norleucine
  C-term NH2
LTFXAYWAQLXAALA

SEQ ID NO: 422 - protein, 15 aa, Artificial Sequence
  Description of Artificial Sequence: Synthetic peptide
  N-term Ac
  MOD_RES (4)..(4): Alpha-Me R8-octenyl-alanine olefin amino acid connected by an all-carbon crosslinker comprising one double bond
  misc_feature (4)..(11): Crosslink between residues
  MOD_RES (5)..(5): Cou4
  MOD_RES (11)..(11): Alpha-Me S5-pentenyl-alanine olefin amino acid connected by an all-carbon crosslinker comprising one double bond
  MOD_RES (14)..(14): Norleucine
  C-term NH2
LTFAXYWAQLAAALA

SEQ ID NO: 423 - protein, 15 aa, Artificial Sequence
  Description of Artificial Sequence: Synthetic peptide
  N-term Ac
  MOD_RES (4)..(4): Alpha-Me R8-octenyl-alanine olefin amino acid connected by an all-carbon crosslinker comprising one double bond
  misc_feature (4)..(11): Crosslink between residues
  MOD_RES (5)..(5): Cou4
  MOD_RES (11)..(11): Alpha-Me S5-pentenyl-alanine olefin amino acid connected by an all-carbon crosslinker comprising one double bond
  MOD_RES (14)..(14): Norleucine
  C-term NH2
LTFAXYWAQLAAALA

SEQ ID NO: 424 - protein, 15 aa, Artificial Sequence
  Description of Artificial Sequence: Synthetic peptide
  N-term Ac
  MOD_RES (4)..(4): Alpha-Me R8-octenyl-alanine olefin amino acid connected by an all-carbon crosslinker comprising one double bond
  misc_feature (4)..(11): Crosslink between residues
  MOD_RES (8)..(8): Cou4
  MOD_RES (11)..(11): Alpha-Me S5-pentenyl-alanine olefin amino acid connected by an all-carbon crosslinker comprising one double bond
  MOD_RES (14)..(14): Norleucine
  C-term NH2
LTFAAYWXQLAAALA

SEQ ID NO: 425 - protein, 15 aa, Artificial Sequence
  Description of Artificial Sequence: Synthetic peptide
  N-term Ac
  MOD_RES (4)..(4): Alpha-Me R8-octenyl-alanine olefin amino acid connected by an all-carbon crosslinker comprising one double bond
  misc_feature (4)..(11): Crosslink between residues
  MOD_RES (11)..(11): Alpha-Me S5-pentenyl-alanine olefin amino acid connected by an all-carbon crosslinker comprising one double bond
  MOD_RES (12)..(12): Cou4
  MOD_RES (14)..(14): Norleucine
  C-term NH2
LTFAAYWAQLAXALA

SEQ ID NO: 426 - protein, 15 aa, Artificial Sequence
  Description of Artificial Sequence: Synthetic peptide
  N-term Ac
  MOD_RES (4)..(4): Alpha-Me R8-octenyl-alanine olefin amino acid connected by an all-carbon crosslinker comprising one double bond
  misc_feature (4)..(11): Crosslink between residues
  MOD_RES (11)..(11): Alpha-Me S5-pentenyl-alanine olefin amino acid connected by an all-carbon crosslinker comprising one double bond
  MOD_RES (12)..(12): Cou4
  MOD_RES (14)..(14): Norleucine
  C-term NH2
LTFAAYWAQLAXALA

SEQ ID NO: 427 - protein, 15 aa, Artificial Sequence
  Description of Artificial Sequence: Synthetic peptide
  N-term Ac
  MOD_RES (4)..(4): Alpha-Me R8-octenyl-alanine olefin amino acid connected by an all-carbon crosslinker comprising one double bond
  misc_feature (4)..(11): Crosslink between residues
  MOD_RES (11)..(11): Alpha-Me S5-pentenyl-alanine olefin amino acid connected by an all-carbon crosslinker comprising one double bond
  MOD_RES (13)..(13): Cou4
  MOD_RES (14)..(14): Norleucine
  C-term NH2
LTFAAYWAQLAAXLA

SEQ ID NO: 428 - protein, 15 aa, Artificial Sequence
  Description of Artificial Sequence: Synthetic peptide
  N-term Ac
  MOD_RES (4)..(4): Alpha-Me R8-octenyl-alanine olefin amino acid connected by an all-carbon crosslinker comprising one double bond
  misc_feature (4)..(11): Crosslink between residues
  MOD_RES (11)..(11): Alpha-Me S5-pentenyl-alanine olefin amino acid connected by an all-carbon crosslinker comprising one double bond
  MOD_RES (13)..(13): Cou4
  MOD_RES (14)..(14): Norleucine
  C-term NH2
LTFAAYWAQLAAXLA

SEQ ID NO: 429 - protein, 15 aa, Artificial Sequence
  Description of Artificial Sequence: Synthetic peptide
  N-term Ac
  MOD_RES (4)..(4): Alpha-Me R8-octenyl-alanine olefin amino acid connected by an all-carbon crosslinker comprising one double bond
  misc_feature (4)..(11): Crosslink between residues
  MOD_RES (11)..(11): Alpha-Me S5-pentenyl-alanine olefin amino acid connected by an all-carbon crosslinker comprising one double bond
  MOD_RES (14)..(14): Norleucine
  C-term OH
LTFAAYWAQLAAALA

SEQ ID NO: 430 - protein, 15 aa, Artificial Sequence
  Description of Artificial Sequence: Synthetic peptide
  N-term Ac
  MOD_RES (4)..(4): Alpha-Me R8-octenyl-alanine olefin amino acid connected by an all-carbon crosslinker comprising one double bond
  misc_feature (4)..(11): Crosslink between residues
  MOD_RES (11)..(11): Alpha-Me S5-pentenyl-alanine olefin amino acid connected by an all-carbon crosslinker comprising one double bond
  MOD_RES (14)..(14): Norleucine
  C-term OH
LTFAAYWAQLAAALA

SEQ ID NO: 431 - protein, 15 aa, Artificial Sequence
  Description of Artificial Sequence: Synthetic peptide
  N-term Ac
  MOD_RES (4)..(4): Alpha-Me R8-octenyl-alanine olefin amino acid connected by an all-carbon crosslinker comprising one double bond
  misc_feature (4)..(11): Crosslink between residues
  MOD_RES (11)..(11): Alpha-Me S5-pentenyl-alanine olefin amino acid connected by an all-carbon crosslinker comprising one double bond
  MOD_RES (14)..(14): Norleucine
  C-term NHnPr
LTFAAYWAQLAAALA

SEQ ID NO: 432 - protein, 15 aa, Artificial Sequence
  Description of Artificial Sequence: Synthetic peptide
  N-term Ac
  MOD_RES (4)..(4): Alpha-Me R8-octenyl-alanine olefin amino acid connected by an all-carbon crosslinker comprising one double bond
  misc_feature (4)..(11): Crosslink between residues
  MOD_RES (11)..(11): Alpha-Me S5-pentenyl-alanine olefin amino acid connected by an all-carbon crosslinker comprising one double bond
  MOD_RES (14)..(14): Norleucine
  C-term NHnPr
LTFAAYWAQLAAALA

SEQ ID NO: 433 - protein, 15 aa, Artificial Sequence
  Description of Artificial Sequence: Synthetic peptide
  N-term Ac
  MOD_RES (4)..(4): Alpha-Me R8-octenyl-alanine olefin amino acid connected by an all-carbon crosslinker comprising one double bond
  misc_feature (4)..(11): Crosslink between residues
  MOD_RES (11)..(11): Alpha-Me S5-pentenyl-alanine olefin amino acid connected by an all-carbon crosslinker comprising one double bond
  MOD_RES (14)..(14): Norleucine
  C-term NHnBu33Me
LTFAAYWAQLAAALA

SEQ ID NO: 434 - protein, 15 aa, Artificial Sequence
  Description of Artificial Sequence: Synthetic peptide
  N-term Ac
  MOD_RES (4)..(4): Alpha-Me R8-octenyl-alanine olefin amino acid connected by an all-carbon crosslinker comprising one double bond
  misc_feature (4)..(11): Crosslink between residues
  MOD_RES (11)..(11): Alpha-Me S5-pentenyl-alanine olefin amino acid connected by an all-carbon crosslinker comprising one double bond
  MOD_RES (14)..(14): Norleucine
  C-term NHnBu33Me
LTFAAYWAQLAAALA

SEQ ID NO: 435 - protein, 15 aa, Artificial Sequence
  Description of Artificial Sequence: Synthetic peptide
  N-term Ac
  MOD_RES (4)..(4): Alpha-Me R8-octenyl-alanine olefin amino acid connected by an all-carbon crosslinker comprising one double bond
  misc_feature (4)..(11): Crosslink between residues
  MOD_RES (11)..(11): Alpha-Me S5-pentenyl-alanine olefin amino acid connected by an all-carbon crosslinker comprising one double bond
  MOD_RES (14)..(14): Norleucine
  C-term NHHex
LTFAAYWAQLAAALA

SEQ ID NO: 436 - protein, 15 aa, Artificial Sequence
  Description of Artificial Sequence: Synthetic peptide
  N-term Ac
  MOD_RES (4)..(4): Alpha-Me R8-octenyl-alanine olefin amino acid connected by an all-carbon crosslinker comprising one double bond
  misc_feature (4)..(11): Crosslink between residues
  MOD_RES (11)..(11): Alpha-Me S5-pentenyl-alanine olefin amino acid connected by an all-carbon crosslinker comprising one double bond
  MOD_RES (14)..(14): Norleucine
  C-term NHHex
LTFAAYWAQLAAALA

SEQ ID NO: 437 - protein, 15 aa, Artificial Sequence
  Description of Artificial Sequence: Synthetic peptide
  N-term Ac
  MOD_RES (4)..(4): Alpha-Me R8-octenyl-alanine olefin amino acid connected by an all-carbon crosslinker comprising one double bond
  misc_feature (4)..(11): Crosslink between residues
  MOD_RES (11)..(11): Alpha-Me S5-pentenyl-alanine olefin amino acid connected by an all-carbon crosslinker comprising one double bond
  MOD_RES (14)..(14): Norleucine
  C-term NH2
LTAAAYWAQLAAALA

SEQ ID NO: 438 - protein, 15 aa, Artificial Sequence
  Description of Artificial Sequence: Synthetic peptide
  N-term Ac
  MOD_RES (3)..(3): hLeu
  MOD_RES (4)..(4): Alpha-Me R8-octenyl-alanine olefin amino acid connected by an all-carbon crosslinker comprising one double bond
  misc_feature (4)..(11): Crosslink between residues
  MOD_RES (11)..(11): Alpha-Me S5-pentenyl-alanine olefin amino acid connected by an all-carbon crosslinker comprising one double bond
  MOD_RES (14)..(14): Norleucine
  C-term NH2
LTLAAYWAQLAAALA

SEQ ID NO: 439 - protein, 15 aa, Artificial Sequence
  Description of Artificial Sequence: Synthetic peptide
  N-term Ac
  MOD_RES (4)..(4): Alpha-Me R8-octenyl-alanine olefin amino acid connected by an all-carbon crosslinker comprising one double bond
  misc_feature (4)..(11): Crosslink between residues
  MOD_RES (11)..(11): Alpha-Me S5-pentenyl-alanine olefin amino acid connected by an all-carbon crosslinker comprising one double bond
  MOD_RES (14)..(14): Norleucine
  C-term NH2
LTFAAYAAQLAAALA

SEQ ID NO: 440 - protein, 15 aa, Artificial Sequence
  Description of Artificial Sequence: Synthetic peptide
  N-term Ac
  MOD_RES (4)..(4): Alpha-Me R8-octenyl-alanine olefin amino acid connected by an all-carbon crosslinker comprising one double bond
  misc_feature (4)..(11): Crosslink between residues
  MOD_RES (7)..(7): 2-Naphthalanine
  MOD_RES (11)..(11): Alpha-Me S5-pentenyl-alanine olefin amino acid connected by an all-carbon crosslinker comprising one double bond
  MOD_RES (14)..(14): Norleucine
  C-term NH2
LTFAAYAAQLAAALA

SEQ ID NO: 441 - protein, 14 aa, Artificial Sequence
  Description of Artificial Sequence: Synthetic peptide
  N-term Ac
  MOD_RES (4)..(4): Alpha-Me R8-octenyl-alanine olefin amino acid connected by an all-carbon crosslinker comprising one double bond
  misc_feature (4)..(11): Crosslink between residues
  MOD_RES (8)..(8): Cou4
  MOD_RES (10)..(10): Cyclobutyl-Ala
  MOD_RES (11)..(11): Alpha-Me S5-pentenyl-alanine olefin amino acid connected by an all-carbon crosslinker comprising one double bond
  C-term NH2
LTFAEYWXQAASAA

SEQ ID NO: 442 - protein, 14 aa, Artificial Sequence
  Description of Artificial Sequence: Synthetic peptide
  N-term Ac
  MOD_RES (4)..(4): Alpha-Me R8-octenyl-alanine olefin amino acid connected by an all-carbon crosslinker comprising one double bond
  misc_feature (4)..(11): Crosslink between residues
  MOD_RES (8)..(8): Cou7
  MOD_RES (10)..(10): Cyclobutyl-Ala
  MOD_RES (11)..(11): Alpha-Me S5-pentenyl-alanine olefin amino acid connected by an all-carbon crosslinker comprising one double bond
  C-term NH2
LTFAEYWXQAASAA

SEQ ID NO: 443 - protein, 14 aa, Artificial Sequence
  Description of Artificial Sequence: Synthetic peptide
  N-term Ac
  MOD_RES (4)..(4): Alpha-Me R8-octenyl-alanine olefin amino acid connected by an all-carbon crosslinker comprising no double bonds
  misc_feature (4)..(11): Crosslink between residues
  MOD_RES (10)..(10): Cyclobutyl-Ala
  MOD_RES (11)..(11): Alpha-Me S5-pentenyl-alanine olefin amino acid connected by an all-carbon saturated crosslinker comprising no double bonds
  C-term NH2
LTFAEYWAQAASAA

SEQ ID NO: 444 - protein, 14 aa, Artificial Sequence
  Description of Artificial Sequence: Synthetic peptide
  N-term Dmaac
  MOD_RES (4)..(4): Alpha-Me R8-octenyl-alanine olefin amino acid connected by an all-carbon crosslinker comprising one double bond
  misc_feature (4)..(11): Crosslink between residues
  MOD_RES (10)..(10): Cyclobutyl-Ala
  MOD_RES (11)..(11): Alpha-Me S5-pentenyl-alanine olefin amino acid connected by an all-carbon crosslinker comprising one double bond
  C-term NH2
LTFAEYWAQAASAA

SEQ ID NO: 445 - protein, 17 aa, Artificial Sequence
  Description of Artificial Sequence: Synthetic peptide
  N-term Dmaac
  MOD_RES (4)..(4): Alpha-Me R8-octenyl-alanine olefin amino acid connected by an all-carbon crosslinker comprising one double bond
  misc_feature (4)..(11): Crosslink between residues
  MOD_RES (11)..(11): Alpha-Me S5-pentenyl-alanine olefin amino acid connected by an all-carbon crosslinker comprising one double bond
  MOD_RES (17)..(17): D-amino acid
  C-term NH2
LTFAAYWAQLAAAAAAA

SEQ ID NO: 446 - protein, 17 aa, Artificial Sequence
  Description of Artificial Sequence: Synthetic peptide
  N-term Dmaac
  MOD_RES (4)..(4): Alpha-Me R8-octenyl-alanine olefin amino acid connected by an all-carbon crosslinker comprising one double bond
  misc_feature (4)..(11): Crosslink between residues
  MOD_RES (11)..(11): Alpha-Me S5-pentenyl-alanine olefin amino acid connected by an all-carbon crosslinker comprising one double bond
  MOD_RES (17)..(17): D-amino acid
  C-term NH2
LTFAAYWAQLAAAAAAA

SEQ ID NO: 447 - protein, 17 aa, Artificial Sequence
  Description of Artificial Sequence: Synthetic peptide
  N-term Dmaac
  MOD_RES (4)..(4): Alpha-Me R8-octenyl-alanine olefin amino acid connected by an all-carbon crosslinker comprising one double bond
  misc_feature (4)..(11): Crosslink between residues
  MOD_RES (11)..(11): Alpha-Me S5-pentenyl-alanine olefin amino acid connected by an all-carbon crosslinker comprising one double bond
  MOD_RES (17)..(17): D-amino acid
  C-term NH2
LTFAEYWAQLAAAAAAA

SEQ ID NO: 448 - protein, 17 aa, Artificial Sequence
  Description of Artificial Sequence: Synthetic peptide
  N-term Dmaac
  MOD_RES (4)..(4): Alpha-Me R8-octenyl-alanine olefin amino acid connected by an all-carbon crosslinker comprising one double bond
  misc_feature (4)..(11): Crosslink between residues
  MOD_RES (11)..(11): Alpha-Me S5-pentenyl-alanine olefin amino acid connected by an all-carbon crosslinker comprising one double bond
  MOD_RES (17)..(17): D-amino acid
  C-term NH2
LTFAEYWAQLAAAAAAA

SEQ ID NO: 449 - protein, 15 aa, Artificial Sequence
  Description of Artificial Sequence: Synthetic peptide
  N-term Dmaac
  MOD_RES (4)..(4): Alpha-Me R8-octenyl-alanine olefin amino acid connected by an all-carbon crosslinker comprising one double bond
  misc_feature (4)..(11): Crosslink between residues
  MOD_RES (6)..(6): 4-carboxy Phe
  MOD_RES (10)..(10): Cyclobutyl-Ala
  MOD_RES (11)..(11): Alpha-Me S5-pentenyl-alanine olefin amino acid connected by an all-carbon crosslinker comprising one double bond
  MOD_RES (15)..(15): D-amino acid
  C-term NH2
LTFAEFWAQAAAAIA

SEQ ID NO: 450 - protein, 15 aa, Artificial Sequence
  Description of Artificial Sequence: Synthetic peptide
  N-term Dmaac
  MOD_RES (4)..(4): Alpha-Me R8-octenyl-alanine olefin amino acid connected by an all-carbon crosslinker comprising one double bond
  misc_feature (4)..(11): Crosslink between residues
  MOD_RES (6)..(6): 4-carboxy Phe
  MOD_RES (10)..(10): Cyclobutyl-Ala
  MOD_RES (11)..(11): Alpha-Me S5-pentenyl-alanine olefin amino acid connected by an all-carbon crosslinker comprising one double bond
  MOD_RES (15)..(15): D-amino acid
  C-term NH2
LTFAEFWAQAAAAIA

SEQ ID NO: 451 - protein, 15 aa, Artificial Sequence
  Description of Artificial Sequence: Synthetic peptide
  N-term Dmaac
  MOD_RES (4)..(4): Alpha-Me R8-octenyl-alanine olefin amino acid connected by an all-carbon crosslinker comprising one double bond
  misc_feature (4)..(11): Crosslink between residues
  MOD_RES (11)..(11): Alpha-Me S5-pentenyl-alanine olefin amino acid connected by an all-carbon crosslinker comprising one double bond
  MOD_RES (14)..(14): Norleucine
  C-term NH2
LTFAAYWAQLAAALA

SEQ ID NO: 452 - protein, 15 aa, Artificial Sequence
  Description of Artificial Sequence: Synthetic peptide
  N-term Dmaac
  MOD_RES (4)..(4): Alpha-Me R8-octenyl-alanine olefin amino acid connected by an all-carbon crosslinker comprising one double bond
  misc_feature (4)..(11): Crosslink between residues
  MOD_RES (11)..(11): Alpha-Me S5-pentenyl-alanine olefin amino acid connected by an all-carbon crosslinker comprising one double bond
  MOD_RES (14)..(14): Norleucine
  C-term NH2
LTFAAYWAQLAAALA

SEQ ID NO: 453 - protein, 15 aa, Artificial Sequence
  Description of Artificial Sequence: Synthetic peptide
  N-term Ac
  MOD_RES (4)..(4): Alpha-Me R8-octenyl-alanine olefin amino acid connected by an all-carbon crosslinker comprising no double bonds
  misc_feature (4)..(11): Crosslink between residues
  MOD_RES (11)..(11): Alpha-Me S5-pentenyl-alanine olefin amino acid connected by an all-carbon crosslinker comprising no double bonds
  MOD_RES (14)..(14): Norleucine
  C-term NH2
LTFAAYWAQLAAALA

SEQ ID NO: 454 - protein, 17 aa, Artificial Sequence
  Description of Artificial Sequence: Synthetic peptide
  N-term Ac
  MOD_RES (4)..(4): Alpha-Me R8-octenyl-alanine olefin amino acid connected by an all-carbon crosslinker comprising no double bonds
  misc_feature (4)..(11): Crosslink between residues
  MOD_RES (11)..(11): Alpha-Me S5-pentenyl-alanine olefin amino acid connected by an all-carbon crosslinker comprising no double bonds
  MOD_RES (17)..(17): D-amino acid
  C-term NH2
LTFAEYWAQLAAAAAAA

SEQ ID NO: 455 - protein, 16 aa, Artificial Sequence
  Description of Artificial Sequence: Synthetic peptide
  MOD_RES (1)..(1): Cou6
  MOD_RES (2)..(2): Beta-Ala
  MOD_RES (6)..(6): Alpha-Me R8-octenyl-alanine olefin amino acid connected by an all-carbon crosslinker comprising one double bond
  misc_feature (6)..(13): Crosslink between residues
  MOD_RES (12)..(12): hLeu
  MOD_RES (13)..(13): Alpha-Me S5-pentenyl-alanine olefin amino acid connected by an all-carbon crosslinker comprising one double bond
  C-term NH2
XALTFAEYWAQLASAA

SEQ ID NO: 456 - protein, 16 aa, Artificial Sequence
  Description of Artificial Sequence: Synthetic peptide
  MOD_RES (1)..(1): Cou8
  MOD_RES (2)..(2): Beta-Ala
  MOD_RES (6)..(6): Alpha-Me R8-octenyl-alanine olefin amino acid connected by an all-carbon crosslinker comprising one double bond
  misc_feature (6)..(13): Crosslink between residues
  MOD_RES (12)..(12): hLeu
  MOD_RES (13)..(13): Alpha-Me S5-pentenyl-alanine olefin amino acid connected by an all-carbon crosslinker comprising one double bond
  C-term NH2
XALTFAEYWAQLASAA

SEQ ID NO: 457 - protein, 17 aa, Artificial Sequence
  Description of Artificial Sequence: Synthetic peptide
  N-term Ac
  MOD_RES (3)..(3): 4-iodo-Phe
  MOD_RES (4)..(4): Alpha-Me R8-octenyl-alanine olefin amino acid connected by an all-carbon crosslinker comprising one double bond
  misc_feature (4)..(11): Crosslink between residues
  MOD_RES (11)..(11): Alpha-Me S5-pentenyl-alanine olefin amino acid connected by an all-carbon crosslinker comprising one double bond
  MOD_RES (17)..(17): D-amino acid
  C-term NH2
LTFAEYWAQLAAAAAAA

SEQ ID NO: 458 - protein, 17 aa, Artificial Sequence
  Description of Artificial Sequence: Synthetic peptide
  N-term Ac
  MOD_RES (4)..(4): Alpha-Me R8-octenyl-alanine olefin amino acid connected by an all-carbon crosslinker comprising one double bond
  misc_feature (4)..(11): Crosslink between residues
  MOD_RES (11)..(11): Alpha-Me S5-pentenyl-alanine olefin amino acid connected by an all-carbon crosslinker comprising one double bond
  MOD_RES (17)..(17): D-amino acid
  C-term NH2
LTFAEYWAQLAAAAAAA

SEQ ID NO: 459 - protein, 17 aa, Artificial Sequence
  Description of Artificial Sequence: Synthetic peptide
  N-term Ac
  MOD_RES (4)..(4): Alpha-Me R8-octenyl-alanine olefin amino acid connected by an all-carbon crosslinker comprising one double bond
  misc_feature (4)..(11): Crosslink between residues
  MOD_RES (11)..(11): Alpha-Me S5-pentenyl-alanine olefin amino acid connected by an all-carbon crosslinker comprising one double bond
  MOD_RES (17)..(17): D-amino acid
  C-term OH
LTFAEYWAQLAAAAAAA

SEQ ID NO: 460 - protein, 17 aa, Artificial Sequence
  Description of Artificial Sequence: Synthetic peptide
  N-term Ac
  MOD_RES (4)..(4): Alpha-Me R8-octenyl-alanine olefin amino acid connected by an all-carbon crosslinker comprising one double bond
  misc_feature (4)..(11): Crosslink between residues
  MOD_RES (11)..(11): Alpha-Me S5-pentenyl-alanine olefin amino acid connected by an all-carbon crosslinker comprising one double bond
  MOD_RES (17)..(17): D-amino acid
  C-term OH
LTFAEYWAQLAAAAAAA

SEQ ID NO: 461 - protein, 17 aa, Artificial Sequence
  Description of Artificial Sequence: Synthetic peptide
  N-term Ac
  MOD_RES (4)..(4): Alpha-Me R8-octenyl-alanine olefin amino acid connected by an all-carbon crosslinker comprising one double bond
  misc_feature (4)..(11): Crosslink between residues
  MOD_RES (11)..(11): Alpha-Me S5-pentenyl-alanine olefin amino acid connected by an all-carbon crosslinker comprising one double bond
  MOD_RES (17)..(17): D-amino acid
  C-term NH2
LTFAEYWAELAAAAAAA

SEQ ID NO: 462 - protein, 17 aa, Artificial Sequence
  Description of Artificial Sequence: Synthetic peptide
  N-term Ac
  MOD_RES (4)..(4): Alpha-Me R8-octenyl-alanine olefin amino acid connected by an all-carbon crosslinker comprising one double bond
  misc_feature (4)..(11): Crosslink between residues
  MOD_RES (11)..(11): Alpha-Me S5-pentenyl-alanine olefin amino acid connected by an all-carbon crosslinker comprising one double bond
  MOD_RES (17)..(17): D-amino acid
  C-term NH2
LTFAEYWAELAAAAAAA

SEQ ID NO: 463 - protein, 17 aa, Artificial Sequence
  Description of Artificial Sequence: Synthetic peptide
  N-term Ac
  MOD_RES (4)..(4): Alpha-Me R8-octenyl-alanine olefin amino acid connected by an all-carbon crosslinker comprising one double bond
  misc_feature (4)..(11): Crosslink between residues
  MOD_RES (11)..(11): Alpha-Me S5-pentenyl-alanine olefin amino acid connected by an all-carbon crosslinker comprising one double bond
  MOD_RES (17)..(17): D-amino acid
  C-term OH
LTFAEYWAELAAAAAAA

SEQ ID NO: 464 - protein, 17 aa, Artificial Sequence
  Description of Artificial Sequence: Synthetic peptide
  N-term Ac
  MOD_RES (4)..(4): Alpha-Me R8-octenyl-alanine olefin amino acid connected by an all-carbon crosslinker comprising one double bond
  misc_feature (4)..(11): Crosslink between residues
  MOD_RES (7)..(7): 6cl-Trp
  MOD_RES (11)..(11): Alpha-Me S5-pentenyl-alanine olefin amino acid connected by an all-carbon crosslinker comprising one double bond
  MOD_RES (17)..(17): D-amino acid
  C-term NH2
LTFAEYWAQLAAAAAAA

SEQ ID NO: 465 - protein, 17 aa, Artificial Sequence
  Description of Artificial Sequence: Synthetic peptide
  N-term Ac
  MOD_RES (4)..(4): Alpha-Me R8-octenyl-alanine olefin amino acid connected by an all-carbon crosslinker comprising one double bond
  misc_feature (4)..(11): Crosslink between residues
  MOD_RES (6)..(6): Phe-4bOH2
  MOD_RES (11)..(11): Alpha-Me S5-pentenyl-alanine olefin amino acid connected by an all-carbon crosslinker comprising one double bond
  MOD_RES (17)..(17): D-amino acid
  C-term NH2
LTFAEFWAQLAAAAAAA

SEQ ID NO: 466 - protein, 20 aa, Artificial Sequence
  Description of Artificial Sequence: Synthetic peptide
  N-term Ac
  MOD_RES (7)..(7): Alpha-Me R8-octenyl-alanine olefin amino acid connected by an all-carbon crosslinker comprising one double bond
  misc_feature (7)..(14): Crosslink between residues
  MOD_RES (14)..(14): Alpha-Me S5-pentenyl-alanine olefin amino acid connected by an all-carbon crosslinker comprising one double bond
  MOD_RES (20)..(20): D-amino acid
  C-term NH2
AAALTFAEYWAQLAAAAAAA

SEQ ID NO: 467 - protein, 17 aa, Artificial Sequence
  Description of Artificial Sequence: Synthetic peptide
  N-term Ac
  MOD_RES (3)..(3): 3,4-difluoro Phe
  MOD_RES (4)..(4): Alpha-Me R8-octenyl-alanine olefin amino acid connected by an all-carbon crosslinker comprising one double bond
  misc_feature (4)..(11): Crosslink between residues
  MOD_RES (11)..(11): Alpha-Me S5-pentenyl-alanine olefin amino acid connected by an all-carbon crosslinker comprising one double bond
  MOD_RES (17)..(17): D-amino acid
  C-term NH2
LTFAEYWAQLAAAAAAA

SEQ ID NO: 468 - protein, 17 aa, Artificial Sequence
  Description of Artificial Sequence: Synthetic peptide
  N-term Ac
  MOD_RES (4)..(4): Alpha-Me R8-octenyl-alanine olefin amino acid connected by an all-carbon crosslinker comprising one double bond
  misc_feature (4)..(11): Crosslink between residues
  MOD_RES (11)..(11): Alpha-Me S5-pentenyl-alanine olefin amino acid connected by an all-carbon crosslinker comprising one double bond
  MOD_RES (17)..(17): D-amino acid
  C-term NH2
RTFAEYWAQLAAAAAAA

SEQ ID NO: 469 - protein, 17 aa, Artificial Sequence
  Description of Artificial Sequence: Synthetic peptide
  N-term Ac
  MOD_RES (4)..(4): Alpha-Me R8-octenyl-alanine olefin amino acid connected by an all-carbon crosslinker comprising one double bond
  misc_feature (4)..(11): Crosslink between residues
  MOD_RES (11)..(11): Alpha-Me S5-pentenyl-alanine olefin amino acid connected by an all-carbon crosslinker comprising one double bond
  MOD_RES (17)..(17): D-amino acid
  C-term NH2
LTAAEYWAQLAAAAAAA

SEQ ID NO: 470 - protein, 17 aa, Artificial Sequence
  Description of Artificial Sequence: Synthetic peptide
  N-term Ac
  MOD_RES (4)..(4): Alpha-Me R8-octenyl-alanine olefin amino acid connected by an all-carbon crosslinker comprising one double bond
  misc_feature (4)..(11): Crosslink between residues
  MOD_RES (8)..(8): 2-aminoisobutyric acid
  MOD_RES (11)..(11): Alpha-Me S5-pentenyl-alanine olefin amino acid connected by an all-carbon crosslinker comprising one double bond
  MOD_RES (17)..(17): D-amino acid
  C-term NH2
LTFAEYWXQLAAAAAAA

SEQ ID NO: 471 - protein, 17 aa, Artificial Sequence
  Description of Artificial Sequence: Synthetic peptide
  N-term Ac
  MOD_RES (4)..(4): Alpha-Me R8-octenyl-alanine olefin amino acid connected by an all-carbon crosslinker comprising one double bond
  misc_feature (4)..(11): Crosslink between residues
  MOD_RES (11)..(11): Alpha-Me S5-pentenyl-alanine olefin amino acid connected by an all-carbon crosslinker comprising one double bond
  MOD_RES (13)..(13): 2-aminoisobutyric acid
  MOD_RES (17)..(17): D-amino acid
  C-term NH2
LTFAEYWAQLAAXAAAA

SEQ ID NO: 472 - protein, 17 aa, Artificial Sequence
  Description of Artificial Sequence: Synthetic peptide
  N-term Ac
  MOD_RES (4)..(4): Alpha-Me R8-octenyl-alanine olefin amino acid connected by an all-carbon crosslinker comprising one double bond
  misc_feature (4)..(11): Crosslink between residues
  MOD_RES (11)..(11): Alpha-Me S5-pentenyl-alanine olefin amino acid connected by an all-carbon crosslinker comprising one double bond
  MOD_RES (14)..(14): 2-aminoisobutyric acid
  MOD_RES (17)..(17): D-amino acid
  C-term NH2
LTFAEYWAQLAAAXAAA

SEQ ID NO: 473 - protein, 17 aa, Artificial Sequence
  Description of Artificial Sequence: Synthetic peptide
  N-term Ac
  MOD_RES (4)..(4): Alpha-Me R8-octenyl-alanine olefin amino acid connected by an all-carbon crosslinker comprising one double bond
  misc_feature (4)..(11): Crosslink between residues
  MOD_RES (11)..(11): Alpha-Me S5-pentenyl-alanine olefin amino acid connected by an all-carbon crosslinker comprising one double bond
  MOD_RES (15)..(15): 2-aminoisobutyric acid
  MOD_RES (17)..(17): D-amino acid
  C-term NH2
LTFAEYWAQLAAAAXAA

SEQ ID NO: 474 - protein, 17 aa, Artificial Sequence
  Description of Artificial Sequence: Synthetic peptide
  N-term Ac
  MOD_RES (4)..(4): Alpha-Me R8-octenyl-alanine olefin amino acid connected by an all-carbon crosslinker comprising one double bond
  misc_feature (4)..(11): Crosslink between residues
  MOD_RES (11)..(11): Alpha-Me S5-pentenyl-alanine olefin amino acid connected by an all-carbon crosslinker comprising one double bond
  MOD_RES (16)..(16): 2-aminoisobutyric acid
  MOD_RES (17)..(17): D-amino acid
  C-term NH2
LTFAEYWAQLAAAAAXA

SEQ ID NO: 475 - protein, 17 aa, Artificial Sequence
  Description of Artificial Sequence: Synthetic peptide
  N-term Ac
  MOD_RES (4)..(4): Alpha-Me R8-octenyl-alanine olefin amino acid connected by an all-carbon crosslinker comprising one double bond
  misc_feature (4)..(11): Crosslink between residues
  MOD_RES (11)..(11): Alpha-Me S5-pentenyl-alanine olefin amino acid connected by an all-carbon crosslinker comprising one double bond
  MOD_RES (16)..(16): 2-aminoisobutyric acid
  MOD_RES (17)..(17): D-amino acid
  C-term NH2
LTFAEYWAQLAAAAAXA

SEQ ID NO: 476 - protein, 17 aa, Artificial Sequence
  Description of Artificial Sequence: Synthetic peptide
  N-term Ac
  MOD_RES (4)..(4): Alpha-Me R8-octenyl-alanine olefin amino acid connected by an all-carbon crosslinker comprising one double bond
  misc_feature (4)..(11): Crosslink between residues
  MOD_RES (11)..(11): Alpha-Me S5-pentenyl-alanine olefin amino acid connected by an all-carbon crosslinker comprising one double bond
  MOD_RES (17)..(17): 2-aminoisobutyric acid
  C-term NH2
LTFAEYWAQLAAAAAAX

SEQ ID NO: 477 - protein, 17 aa, Artificial Sequence
  Description of Artificial Sequence: Synthetic peptide
  N-term Ac
  MOD_RES (4)..(4): Alpha-Me R8-octenyl-alanine olefin amino acid connected by an all-carbon crosslinker comprising one double bond
  misc_feature (4)..(11): Crosslink between residues
  MOD_RES (11)..(11): Alpha-Me S5-pentenyl-alanine olefin amino acid connected by an all-carbon crosslinker comprising one double bond
  MOD_RES (13)..(13): D-amino acid
  MOD_RES (17)..(17): D-amino acid
  C-term NH2
LTFAEYWAQLAAAAAAA

SEQ ID NO: 478 - protein, 17 aa, Artificial Sequence
  Description of Artificial Sequence: Synthetic peptide
  N-term Ac
  MOD_RES (4)..(4): Alpha-Me R8-octenyl-alanine olefin amino acid connected by an all-carbon crosslinker comprising one double bond
  misc_feature (4)..(11): Crosslink between residues
  MOD_RES (11)..(11): Alpha-Me S5-pentenyl-alanine olefin amino acid connected by an all-carbon crosslinker comprising one double bond
  MOD_RES (14)..(14): D-amino acid
  MOD_RES (17)..(17): D-amino acid
  C-term NH2
LTFAEYWAQLAAAAAAA

SEQ ID NO: 479 - protein, 17 aa, Artificial Sequence
  Description of Artificial Sequence: Synthetic peptide
  N-term Ac
  MOD_RES (4)..(4): Alpha-Me R8-octenyl-alanine olefin amino acid connected by an all-carbon crosslinker comprising one double bond
  misc_feature (4)..(11): Crosslink between residues
  MOD_RES (11)..(11): Alpha-Me S5-pentenyl-alanine olefin amino acid connected by an all-carbon crosslinker comprising one double bond
  MOD_RES (15)..(15): D-amino acid
  MOD_RES (17)..(17): D-amino acid
  C-term NH2
LTFAEYWAQLAAAAAAA

SEQ ID NO: 480 - protein, 17 aa, Artificial Sequence
  Description of Artificial Sequence: Synthetic peptide
  N-term Ac
  MOD_RES (4)..(4): Alpha-Me R8-octenyl-alanine olefin amino acid connected by an all-carbon crosslinker comprising one double bond
  misc_feature (4)..(11): Crosslink between residues
  MOD_RES (11)..(11): Alpha-Me S5-pentenyl-alanine olefin amino acid connected by an all-carbon crosslinker comprising one double bond
  MOD_RES (15)..(15): D-amino acid
  MOD_RES (17)..(17): D-amino acid
  C-term NH2
LTFAEYWAQLAAAAAAA

SEQ ID NO: 481 - protein, 17 aa, Artificial Sequence
  Description of Artificial Sequence: Synthetic peptide
  N-term Ac
  MOD_RES (4)..(4): Alpha-Me R8-octenyl-alanine olefin amino acid connected by an all-carbon crosslinker comprising one double bond
  misc_feature (4)..(11): Crosslink between residues
  MOD_RES (11)..(11): Alpha-Me S5-pentenyl-alanine olefin amino acid connected by an all-carbon crosslinker comprising one double bond
  MOD_RES (16)..(17): D-amino acid
  C-term NH2
LTFAEYWAQLAAAAAAA

SEQ ID NO: 482 - protein, 17 aa, Artificial Sequence
  Description of Artificial Sequence: Synthetic peptide
  N-term Ac
  MOD_RES (4)..(4): Alpha-Me R8-octenyl-alanine olefin amino acid connected by an all-carbon crosslinker comprising one double bond
  misc_feature (4)..(11): Crosslink between residues
  MOD_RES (11)..(11): Alpha-Me S5-pentenyl-alanine olefin amino acid connected by an all-carbon crosslinker comprising one double bond
  C-term NH2
LTFAEYWAQLAAAAAAA

SEQ ID NO: 483 - protein, 17 aa, Artificial Sequence
  Description of Artificial Sequence: Synthetic peptide
  N-term Ac
  MOD_RES (4)..(4): Alpha-Me R8-octenyl-alanine olefin amino acid connected by an all-carbon crosslinker comprising one double bond
  misc_feature (4)..(11): Crosslink between residues
  MOD_RES (11)..(11): Alpha-Me S5-pentenyl-alanine olefin amino acid connected by an all-carbon crosslinker comprising one double bond
  MOD_RES (13)..(13): Sarcosine
  MOD_RES (17)..(17): D-amino acid
  C-term NH2
LTFAEYWAQLAAXAAAA

SEQ ID NO: 484 - protein, 17 aa, Artificial Sequence
  Description of Artificial Sequence: Synthetic peptide
  N-term Ac
  MOD_RES (4)..(4): Alpha-Me R8-octenyl-alanine olefin amino acid connected by an all-carbon crosslinker comprising one double bond
  misc_feature (4)..(11): Crosslink between residues
  MOD_RES (11)..(11): Alpha-Me S5-pentenyl-alanine olefin amino acid connected by an all-carbon crosslinker comprising one double bond
  MOD_RES (14)..(14): Sarcosine
  MOD_RES (17)..(17): D-amino acid
  C-term NH2
LTFAEYWAQLAAAXAAA

SEQ ID NO: 485 - protein, 17 aa, Artificial Sequence
  Description of Artificial Sequence: Synthetic peptide
  N-term Ac
  MOD_RES (4)..(4): Alpha-Me R8-octenyl-alanine olefin amino acid connected by an all-carbon crosslinker comprising one double bond
  misc_feature (4)..(11): Crosslink between residues
  MOD_RES (11)..(11): Alpha-Me S5-pentenyl-alanine olefin amino acid connected by an all-carbon crosslinker comprising one double bond
  MOD_RES (15)..(15): Sarcosine
  MOD_RES (17)..(17): D-amino acid
  C-term NH2
LTFAEYWAQLAAAAXAA

SEQ ID NO: 486 - protein, 17 aa, Artificial Sequence
  Description of Artificial Sequence: Synthetic peptide
  N-term Ac
  MOD_RES (4)..(4): Alpha-Me R8-octenyl-alanine olefin amino acid connected by an all-carbon crosslinker comprising one double bond
  misc_feature (4)..(11): Crosslink between residues
  MOD_RES (11)..(11): Alpha-Me S5-pentenyl-alanine olefin amino acid connected by an all-carbon crosslinker comprising one double bond
  MOD_RES (16)..(16): Sarcosine
  MOD_RES (17)..(17): D-amino acid
  C-term NH2
LTFAEYWAQLAAAAAXA

SEQ ID NO: 487 - protein, 17 aa, Artificial Sequence
  Description of Artificial Sequence: Synthetic peptide
  N-term Ac
  MOD_RES (4)..(4): Alpha-Me R8-octenyl-alanine olefin amino acid connected by an all-carbon crosslinker comprising one double bond
  misc_feature (4)..(11): Crosslink between residues
  MOD_RES (11)..(11): Alpha-Me S5-pentenyl-alanine olefin amino acid connected by an all-carbon crosslinker comprising one double bond
  MOD_RES (17)..(17): Sarcosine
  C-term NH2
LTFAEYWAQLAAAAAAX

SEQ ID NO: 488 - protein, 17 aa, Artificial Sequence
  Description of Artificial Sequence: Synthetic peptide
  N-term Ac
  MOD_RES (1)..(1): N15 isotopic-Leu
  MOD_RES (4)..(4): Alpha-Me R8-octenyl-alanine olefin amino acid connected by an all-carbon crosslinker comprising one double bond
  misc_feature (4)..(11): Crosslink between residues
  MOD_RES (11)..(11): Alpha-Me S5-pentenyl-alanine olefin amino acid connected by an all-carbon crosslinker comprising one double bond
  MOD_RES (17)..(17): D-amino acid
  C-term NH2
LTFAEYWAQLAAAAAAA

SEQ ID NO: 489 - protein, 16 aa, Artificial Sequence
  Description of Artificial Sequence: Synthetic peptide
  N-term Ac
  MOD_RES (3)..(3): Alpha-Me R8-octenyl-alanine olefin amino acid connected by an all-carbon crosslinker comprising one double bond
  misc_feature (3)..(10): Crosslink between residues
  MOD_RES (10)..(10): Alpha-Me S5-pentenyl-alanine olefin amino acid connected by an all-carbon crosslinker comprising one double bond
  MOD_RES (16)..(16): D-amino acid
  C-term NH2
TFAEYWAQLAAAAAAA

SEQ ID NO: 490 - protein, 15 aa, Artificial Sequence
  Description of Artificial Sequence: Synthetic peptide
  N-term Ac
  MOD_RES (2)..(2): Alpha-Me R8-octenyl-alanine olefin amino acid connected by an all-carbon crosslinker comprising one double bond
  misc_feature (2)..(9): Crosslink between residues
  MOD_RES (9)..(9): Alpha-Me S5-pentenyl-alanine olefin amino acid connected by an all-carbon crosslinker comprising one double bond
  MOD_RES (15)..(15): D-amino acid
  C-term NH2
FAEYWAQLAAAAAAA

SEQ ID NO: 491 - protein, 17 aa, Artificial Sequence
  Description of Artificial Sequence: Synthetic peptide
  N-term Ac
  MOD_RES (4)..(4): Alpha-Me R8-octenyl-alanine olefin amino acid connected by an all-carbon crosslinker comprising one double bond
  misc_feature (4)..(11): Crosslink between residues
  MOD_RES (11)..(11): Alpha-Me S5-pentenyl-alanine olefin amino acid connected by an all-carbon crosslinker comprising one double bond
  MOD_RES (17)..(17): D-amino acid
  C-term NH2
LVFAEYWAQLAAAAAAA

SEQ ID NO: 492 - protein, 17 aa, Artificial Sequence
  Description of Artificial Sequence: Synthetic peptide
  N-term Ac
  MOD_RES (4)..(4): Alpha-Me R8-octenyl-alanine olefin amino acid connected by an all-carbon crosslinker comprising one double bond
  misc_feature (4)..(11): Crosslink between residues
  MOD_RES (11)..(11): Alpha-Me S5-pentenyl-alanine olefin amino acid connected by an all-carbon crosslinker comprising one double bond
  MOD_RES (17)..(17): D-amino acid
  C-term NH2
AAFAEYWAQLAAAAAAA

SEQ ID NO: 493 - protein, 16 aa, Artificial Sequence
  Description of Artificial Sequence: Synthetic peptide
  N-term Ac
  MOD_RES (4)..(4): Alpha-Me R8-octenyl-alanine olefin amino acid connected by an all-carbon crosslinker comprising one double bond
  misc_feature (4)..(11): Crosslink between residues
  MOD_RES (11)..(11): Alpha-Me S5-pentenyl-alanine olefin amino acid connected by an all-carbon crosslinker comprising one double bond
  MOD_RES (16)..(16): D-amino acid
  C-term NH2
LTFAEYWAQLAAAAAA

SEQ ID NO: 494 - protein, 15 aa, Artificial Sequence
  Description of Artificial Sequence: Synthetic peptide
  N-term Ac
  MOD_RES (4)..(4): Alpha-Me R8-octenyl-alanine olefin amino acid connected by an all-carbon crosslinker comprising one double bond
  misc_feature (4)..(11): Crosslink between residues
  MOD_RES (11)..(11): Alpha-Me S5-pentenyl-alanine olefin amino acid connected by an all-carbon crosslinker comprising one double bond
  MOD_RES (15)..(15): D-amino acid
  C-term NH2
LTFAEYWAQLAAAAA

SEQ ID NO: 495 - protein, 14 aa, Artificial Sequence
  Description of Artificial Sequence: Synthetic peptide
  N-term Ac
  MOD_RES (4)..(4): Alpha-Me R8-octenyl-alanine olefin amino acid connected by an all-carbon crosslinker comprising one double bond
  misc_feature (4)..(11): Crosslink between residues
  MOD_RES (11)..(11): Alpha-Me S5-pentenyl-alanine olefin amino acid connected by an all-carbon crosslinker comprising one double bond
  MOD_RES (14)..(14): D-amino acid
  C-term NH2
LTFAEYWAQLAAAA

SEQ ID NO: 496 - protein, 13 aa, Artificial Sequence
  Description of Artificial Sequence: Synthetic peptide
  N-term Ac
  MOD_RES (4)..(4): Alpha-Me R8-octenyl-alanine olefin amino acid connected by an all-carbon crosslinker comprising one double bond
  misc_feature (4)..(11): Crosslink between residues
  MOD_RES (11)..(11): Alpha-Me S5-pentenyl-alanine olefin amino acid connected by an all-carbon crosslinker comprising one double bond
  MOD_RES (13)..(13): D-amino acid
  C-term NH2
LTFAEYWAQLAAA

SEQ ID NO: 497 - protein, 12 aa, Artificial Sequence
  Description of Artificial Sequence: Synthetic peptide
  N-term Ac
  MOD_RES (4)..(4): Alpha-Me R8-octenyl-alanine olefin amino acid connected by an all-carbon crosslinker comprising one double bond
  misc_feature (4)..(11): Crosslink between residues
  MOD_RES (11)..(11): Alpha-Me S5-pentenyl-alanine olefin amino acid connected by an all-carbon crosslinker comprising one double bond
  MOD_RES (12)..(12): D-amino acid
  C-term NH2
LTFAEYWAQLAA

SEQ ID NO: 498 - protein, 14 aa, Artificial Sequence
  Description of Artificial Sequence: Synthetic peptide
  N-term Ac
  MOD_RES (4)..(4): Alpha-Me R8-octenyl-alanine olefin amino acid connected by an all-carbon crosslinker comprising one double bond
  misc_feature (4)..(11): Crosslink between residues
  MOD_RES (11)..(11): Alpha-Me S5-pentenyl-alanine olefin amino acid connected by an all-carbon crosslinker comprising one double bond
  C-term OH
LTFAEYWAQLAAAA

SEQ ID NO: 499 - protein, 12 aa, Artificial Sequence
  Description of Artificial Sequence: Synthetic peptide
  N-term Ac
  MOD_RES (4)..(4): Alpha-Me R8-octenyl-alanine olefin amino acid connected by an all-carbon crosslinker comprising one double bond
  misc_feature (4)..(11): Crosslink between residues
  MOD_RES (11)..(11): Alpha-Me S5-pentenyl-alanine olefin amino acid connected by an all-carbon crosslinker comprising one double bond
  C-term OH
LTFAEYWAQLAA

SEQ ID NO: 500 - protein, 14 aa, Artificial Sequence
  Description of Artificial Sequence: Synthetic peptide
  N-term Ac
  MOD_RES (4)..(4): Alpha-Me R8-octenyl-alanine olefin amino acid connected by an all-carbon crosslinker comprising one double bond
  misc_feature (4)..(11): Crosslink between residues
  MOD_RES (11)..(11): Alpha-Me S5-pentenyl-alanine olefin amino acid connected by an all-carbon crosslinker comprising one double bond
  C-term NH2
LTFAEYWAQLAAAA

SEQ ID NO: 501 - protein, 14 aa, Artificial Sequence
  Description of Artificial Sequence: Synthetic peptide
  N-term Ac
  MOD_RES (4)..(4): Alpha-Me R8-octenyl-alanine olefin amino acid connected by an all-carbon crosslinker comprising one double bond
  misc_feature (4)..(11): Crosslink between residues
  MOD_RES (10)..(10): Cyclobutyl-Ala
  MOD_RES (11)..(11): Alpha-Me S5-pentenyl-alanine olefin amino acid connected by an all-carbon crosslinker comprising one double bond
  C-term OH
LTFAEYWAQAASAA

SEQ ID NO: 502 - protein, 12 aa, Artificial Sequence
  Description of Artificial Sequence: Synthetic peptide
  N-term Ac
  MOD_RES (4)..(4): Alpha-Me R8-octenyl-alanine olefin amino acid connected by an all-carbon crosslinker comprising one double bond
  misc_feature (4)..(11): Crosslink between residues
  MOD_RES (10)..(10): Cyclobutyl-Ala
  MOD_RES (11)..(11): Alpha-Me S5-pentenyl-alanine olefin amino acid connected by an all-carbon crosslinker comprising one double bond
  C-term OH
LTFAEYWAQAAS

SEQ ID NO: 503 - protein, 12 aa, Artificial Sequence
  Description of Artificial Sequence: Synthetic peptide
  N-term Ac
  MOD_RES (4)..(4): Alpha-Me R8-octenyl-alanine olefin amino acid connected by an all-carbon crosslinker comprising one double bond
  misc_feature (4)..(11): Crosslink between residues
  MOD_RES (10)..(10): Cyclobutyl-Ala
  MOD_RES (11)..(11): Alpha-Me S5-pentenyl-alanine olefin amino acid connected by an all-carbon crosslinker comprising one double bond
  C-term NH2
LTFAEYWAQAAS

SEQ ID NO: 504 - protein, 17 aa, Artificial Sequence
  Description of Artificial Sequence: Synthetic peptide
  N-term 4FBzl
  MOD_RES (4)..(4): Alpha-Me R8-octenyl-alanine olefin amino acid connected by an all-carbon crosslinker comprising one double bond
  misc_feature (4)..(11): Crosslink between residues
  MOD_RES (11)..(11): Alpha-Me S5-pentenyl-alanine olefin amino acid connected by an all-carbon crosslinker comprising one double bond
  MOD_RES (17)..(17): D-amino acid
  C-term NH2
LTFAEYWAQLAAAAAAA

SEQ ID NO: 505 - protein, 14 aa, Artificial Sequence
  Description of Artificial Sequence: Synthetic peptide
  N-term 4FBzl
  MOD_RES (4)..(4): Alpha-Me R8-octenyl-alanine olefin amino acid connected by an all-carbon crosslinker comprising one double bond
  misc_feature (4)..(11): Crosslink between residues
  MOD_RES (10)..(10): Cyclobutyl-Ala
  MOD_RES (11)..(11): Alpha-Me S5-pentenyl-alanine olefin amino acid connected by an all-carbon crosslinker comprising one double bond
  C-term NH2
LTFAEYWAQAASAA

SEQ ID NO: 506 - protein, 17 aa, Artificial Sequence
  Description of Artificial Sequence: Synthetic peptide
  N-term Ac
  MOD_RES (4)..(4): Alpha-Me R8-octenyl-alanine olefin amino acid connected by an all-carbon crosslinker comprising one double bond
  misc_feature (4)..(11): Crosslink between residues
  MOD_RES (11)..(11): Alpha-Me S5-pentenyl-alanine olefin amino acid connected by an all-carbon crosslinker comprising one double bond
  MOD_RES (17)..(17): D-amino acid
  C-term NH2
LTFARYWAQLAAAAAAA

SEQ ID NO: 507 - protein, 17 aa, Artificial Sequence
  Description of Artificial Sequence: Synthetic peptide
  N-term Ac
  MOD_RES (4)..(4): Alpha-Me R8-octenyl-alanine olefin amino acid connected by an all-carbon crosslinker comprising one double bond
  misc_feature (4)..(11): Crosslink between residues
  MOD_RES (11)..(11): Alpha-Me S5-pentenyl-alanine olefin amino acid connected by an all-carbon crosslinker comprising one double bond
  MOD_RES (17)..(17): D-amino acid
  C-term NH2
LTFAHYWAQLAAAAAAA

SEQ ID NO: 508 - protein, 17 aa, Artificial Sequence
  Description of Artificial Sequence: Synthetic peptide
  N-term Ac
  MOD_RES (4)..(4): Alpha-Me R8-octenyl-alanine olefin amino acid connected by an all-carbon crosslinker comprising one double bond
  misc_feature (4)..(11): Crosslink between residues
  MOD_RES (11)..(11): Alpha-Me S5-pentenyl-alanine olefin amino acid connected by an all-carbon crosslinker comprising one double bond
  MOD_RES (17)..(17): D-amino acid
  C-term NH2
LTFAQYWAQLAAAAAAA

SEQ ID NO: 509 - protein, 17 aa, Artificial Sequence
  Description of Artificial Sequence: Synthetic peptide
  N-term Ac
  MOD_RES (4)..(4): Alpha-Me R8-octenyl-alanine olefin amino acid connected by an all-carbon crosslinker comprising one double bond
  misc_feature (4)..(11): Crosslink between residues
  MOD_RES (5)..(5): Cit
  MOD_RES (11)..(11): Alpha-Me S5-pentenyl-alanine olefin amino acid connected by an all-carbon crosslinker comprising one double bond
  MOD_RES (17)..(17): D-amino acid
  C-term NH2
LTFAXYWAQLAAAAAAA

SEQ ID NO: 510 - protein, 19 aa, Artificial Sequence
  Description of Artificial Sequence: Synthetic peptide
  N-term Ac
  MOD_RES (4)..(4): Alpha-Me R8-octenyl-alanine olefin amino acid connected by an all-carbon crosslinker comprising one double bond
  misc_feature (4)..(13): Crosslink between residues
  MOD_RES (6)..(7): D-amino acid
  MOD_RES (13)..(13): Alpha-Me S5-pentenyl-alanine olefin amino acid connected by an all-carbon crosslinker comprising one double bond
  MOD_RES (19)..(19): D-amino acid
  C-term NH2
LTFAELAYWAQLAAAAAAA

SEQ ID NO: 511 - protein, 18 aa, Artificial Sequence
  Description of Artificial Sequence: Synthetic peptide
  N-term Ac
  MOD_RES (4)..(4): Alpha-Me R8-octenyl-alanine olefin amino acid connected by an all-carbon crosslinker comprising one double bond
  misc_feature (4)..(12): Crosslink between residues
  MOD_RES (5)..(5): Phe-4
  MOD_RES (6)..(6): D-amino acid
  MOD_RES (12)..(121): Alpha-Me S5-pentenyl-alanine olefin amino acid connected by an all-carbon crosslinker comprising one double bond
  MOD_RES (18)..(18): D-amino acid
  C-term NH2
LTFAFGYWAQLAAAAAAA

SEQ ID NO: 512 - protein, 17 aa, Artificial Sequence
  Description of Artificial Sequence: Synthetic peptide
  N-term Ac
  MOD_RES (4)..(4): Alpha-Me R8-octenyl-alanine olefin amino acid connected by an all-carbon crosslinker comprising one double bond
  misc_feature (4)..(11): Crosslink between residues
  MOD_RES (5)..(5): 2m-Arg
  MOD_RES (11)..(11): Alpha-Me S5-pentenyl-alanine olefin amino acid connected by an all-carbon crosslinker comprising one double bond
  MOD_RES (17)..(17): D-amino acid
  C-term NH2
LTFARYWAQLAAAAAAA

SEQ ID NO: 513 - protein, 17 aa, Artificial Sequence
  Description of Artificial Sequence: Synthetic peptide
  N-term Ac
  MOD_RES (4)..(4): Alpha-Me R8-octenyl-alanine olefin amino acid connected by an all-carbon crosslinker comprising one double bond
  misc_feature (4)..(11): Crosslink between residues
  MOD_RES (5)..(5): ip-Lys
  MOD_RES (11)..(11): Alpha-Me S5-pentenyl-alanine olefin amino acid connected by an all-carbon crosslinker comprising one double bond
  MOD_RES (17)..(17): D-amino acid
  C-term NH2
LTFAKYWAQLAAAAAAA

SEQ ID NO: 514 - protein, 17 aa, Artificial Sequence
  Description of Artificial Sequence: Synthetic peptide
  N-term Ac
  MOD_RES (4)..(4): Alpha-Me R8-octenyl-alanine olefin amino acid connected by an all-carbon crosslinker comprising one double bond
  misc_feature (4)..(11): Crosslink between residues
  MOD_RES (5)..(5): Phe-4NH2
  MOD_RES (11)..(11): Alpha-Me S5-pentenyl-alanine olefin amino acid connected by an all-carbon crosslinker comprising one double bond
  MOD_RES (17)..(17): D-amino acid
  C-term NH2
LTFAFYWAQLAAAAAAA

SEQ ID NO: 515 - protein, 17 aa, Artificial Sequence
  Description of Artificial Sequence: Synthetic peptide
  N-term Ac
  MOD_RES (4)..(4): Alpha-Me R8-octenyl-alanine olefin amino acid connected by an all-carbon crosslinker comprising one double bond
  misc_feature (4)..(11): Crosslink between residues
  MOD_RES (11)..(11): Alpha-Me S5-pentenyl-alanine olefin amino acid connected by an all-carbon crosslinker comprising one double bond
  MOD_RES (17)..(17): D-amino acid
  C-term NH2
LTFAEYWAALAAAAAAA

SEQ ID NO: 516 - protein, 17 aa, Artificial Sequence
  Description of Artificial Sequence: Synthetic peptide
  N-term Ac
  MOD_RES (4)..(4): Alpha-Me R8-octenyl-alanine olefin amino acid connected by an all-carbon crosslinker comprising one double bond
  misc_feature (4)..(11): Crosslink between residues
  MOD_RES (11)..(11): Alpha-Me S5-pentenyl-alanine olefin amino acid connected by an all-carbon crosslinker comprising one double bond
  MOD_RES (17)..(17): D-amino acid
  C-term NH2
LTFAEYWALLAAAAAAA

SEQ ID NO: 517 - protein, 17 aa, Artificial Sequence
  Description of Artificial Sequence: Synthetic peptide
  N-term Ac
  MOD_RES (4)..(4): Alpha-Me R8-octenyl-alanine olefin amino acid connected by an all-carbon crosslinker comprising one double bond
  misc_feature (4)..(11): Crosslink between residues
  MOD_RES (9)..(9): 2-aminoisobutyric acid
  MOD_RES (11)..(11): Alpha-Me S5-pentenyl-alanine olefin amino acid connected by an all-carbon crosslinker comprising one double bond
  MOD_RES (17)..(17): D-amino acid
  C-term NH2
LTFAEYWAXLAAAAAAA

SEQ ID NO: 518 - protein, 17 aa, Artificial Sequence
  Description of Artificial Sequence: Synthetic peptide
  N-term Ac
  MOD_RES (4)..(4): Alpha-Me R8-octenyl-alanine olefin amino acid connected by an all-carbon crosslinker comprising one double bond
  misc_feature (4)..(11): Crosslink between residues
  MOD_RES (11)..(11): Alpha-Me S5-pentenyl-alanine olefin amino acid connected by an all-carbon crosslinker comprising one double bond
  MOD_RES (17)..(17): D-amino acid
  C-term NH2
LTFAEYWASLAAAAAAA

SEQ ID NO: 519 - protein, 17 aa, Artificial Sequence
  Description of Artificial Sequence: Synthetic peptide
  N-term Ac
  MOD_RES (4)..(4): Alpha-Me R8-octenyl-alanine olefin amino acid connected by an all-carbon crosslinker comprising one double bond
  misc_feature (4)..(11): Crosslink between residues
  MOD_RES (11)..(11): Alpha-Me S5-pentenyl-alanine olefin amino acid connected by an all-carbon crosslinker comprising one double bond
  MOD_RES (17)..(17): D-amino acid
  C-term NH2
LTFAEYWANLAAAAAAA

SEQ ID NO: 520 - protein, 17 aa, Artificial Sequence
  Description of Artificial Sequence: Synthetic peptide
  N-term Ac
  MOD_RES (4)..(4): Alpha-Me R8-octenyl-alanine olefin amino acid connected by an all-carbon crosslinker comprising one double bond
  misc_feature (4)..(11): Crosslink between residues
  MOD_RES (9)..(9): Cit
  MOD_RES (11)..(11): Alpha-Me S5-pentenyl-alanine olefin amino acid connected by an all-carbon crosslinker comprising one double bond
  MOD_RES (17)..(17): D-amino acid
  C-term NH2
LTFAEYWAXLAAAAAAA

SEQ ID NO: 521 - protein, 17 aa, Artificial Sequence
  Description of Artificial Sequence: Synthetic peptide
  N-term Ac
  MOD_RES (4)..(4): Alpha-Me R8-octenyl-alanine olefin amino acid connected by an all-carbon crosslinker comprising one double bond
  misc_feature (4)..(11): Crosslink between residues
  MOD_RES (11)..(11): Alpha-Me S5-pentenyl-alanine olefin amino acid connected by an all-carbon crosslinker comprising one double bond
  MOD_RES (17)..(17): D-amino acid
  C-term NH2
LTFAEYWAHLAAAAAAA

SEQ ID NO: 522 - protein, 17 aa, Artificial Sequence
  Description of Artificial Sequence: Synthetic peptide
  N-term Ac
  MOD_RES (4)..(4): Alpha-Me R8-octenyl-alanine olefin amino acid connected by an all-carbon crosslinker comprising one double bond
  misc_feature (4)..(11): Crosslink between residues
  MOD_RES (11)..(11): Alpha-Me S5-pentenyl-alanine olefin amino acid connected by an all-carbon crosslinker comprising one double bond
  MOD_RES (17)..(17): D-amino acid
  C-term NH2
LTFAEYWARLAAAAAAA

SEQ ID NO: 523 - protein, 17 aa, Artificial Sequence
  Description of Artificial Sequence: Synthetic peptide
  N-term Ac
  MOD_RES (4)..(4): Alpha-Me R8-octenyl-alanine olefin amino acid connected by an all-carbon crosslinker comprising one double bond
  MOD_RES (6)..(6): pTyr
  misc_feature (4)..(11): Crosslink between residues
  MOD_RES (11)..(11): Alpha-Me S5-pentenyl-alanine olefin amino acid connected by an all-carbon crosslinker comprising one double bond
  MOD_RES (17)..(17): D-amino acid
  C-term NH2
LTFAEYWAQLAAAAAAA

SEQ ID NO: 524 - protein, 14 aa, Artificial Sequence
  Description of Artificial Sequence: Synthetic peptide
  N-term Cbm
  MOD_RES (4)..(4): Alpha-Me R8-octenyl-alanine olefin amino acid connected by an all-carbon crosslinker comprising one double bond
  misc_feature (4)..(11): Crosslink between residues
  MOD_RES (10)..(10): Cyclobutyl-Ala
  MOD_RES (11)..(11): Alpha-Me S5-pentenyl-alanine olefin amino acid connected by an all-carbon crosslinker comprising one double bond
  C-term NH2
LTFAEYWAQAASAA

SEQ ID NO: 525 - protein, 17 aa, Artificial Sequence
  Description of Artificial Sequence: Synthetic peptide
  N-term Cbm
  MOD_RES (4)..(4): Alpha-Me R8-octenyl-alanine olefin amino acid connected by an all-carbon crosslinker comprising one double bond
  misc_feature (4)..(11): Crosslink between residues
  MOD_RES (11)..(11): Alpha-Me S5-pentenyl-alanine olefin amino acid connected by an all-carbon crosslinker comprising one double bond
  MOD_RES (17)..(17): D-amino acid
  C-term NH2
LTFAEYWAQLAAAAAAA

SEQ ID NO: 526 - protein, 17 aa, Artificial Sequence
  Description of Artificial Sequence: Synthetic peptide
  N-term Ac
  MOD_RES (4)..(4): Alpha-Me R8-octenyl-alanine olefin amino acid connected by an all-carbon crosslinker comprising one double bond
  misc_feature (4)..(11): Crosslink between residues
  MOD_RES (11)..(11): Alpha-Me S5-pentenyl-alanine olefin amino acid connected by an all-carbon crosslinker comprising one double bond
  MOD_RES (17)..(17): D-amino acid
  C-term NH2
LTFAEYWAQLASAAAAA

SEQ ID NO: 527 - protein, 17 aa, Artificial Sequence
  Description of Artificial Sequence: Synthetic peptide
  N-term Ac
  MOD_RES (4)..(4): Alpha-Me R8-octenyl-alanine olefin amino acid connected by an all-carbon crosslinker comprising one double bond
  misc_feature (4)..(11): Crosslink between residues
  MOD_RES (11)..(11): Alpha-Me S5-pentenyl-alanine olefin amino acid connected by an all-carbon crosslinker comprising one double bond
  MOD_RES (17)..(17): D-amino acid
  C-term NH2
LTFAEYWAQLAAAAASA

SEQ ID NO: 528 - protein, 17 aa, Artificial Sequence
  Description of Artificial Sequence: Synthetic peptide
  N-term Ac
  MOD_RES (4)..(4): Alpha-Me R8-octenyl-alanine olefin amino acid connected by an all-carbon crosslinker comprising one double bond
  misc_feature (4)..(11): Crosslink between residues
  MOD_RES (11)..(11): Alpha-Me S5-pentenyl-alanine olefin amino acid connected by an all-carbon crosslinker comprising one double bond
  MOD_RES (17)..(17): D-amino acid
  C-term NH2
LTFAEYWAQLASAAASA

SEQ ID NO: 529 - protein, 18 aa, Artificial Sequence
  Description of Artificial Sequence: Synthetic peptide
  N-term Ac
  MOD_RES (4)..(4): Alpha-Me R8-octenyl-alanine olefin amino acid connected by an all-carbon crosslinker comprising one double bond
  misc_feature (4)..(12): Crosslink between residues
  MOD_RES (11)..(11): Beta-Ala
  MOD_RES (12)..(12): Alpha-Me S5-pentenyl-alanine olefin amino acid connected by an all-carbon crosslinker comprising one double bond
  MOD_RES (18)..(18): D-amino acid
  C-term NH2
LTFAEYWAQTAAAAAAAA

SEQ ID NO: 530 - protein, 17 aa, Artificial Sequence
  Description of Artificial Sequence: Synthetic peptide
  N-term Ac
  MOD_RES (4)..(4): Alpha-Me R8-octenyl-alanine olefin amino acid connected by an all-carbon crosslinker comprising one double bond
  misc_feature (4)..(11): Crosslink between residues
  MOD_RES (10)..(10): Adamantyl-Gly
  MOD_RES (11)..(11): Alpha-Me S5-pentenyl-alanine olefin amino acid connected by an all-carbon crosslinker comprising one double bond
  MOD_RES (17)..(17): D-amino acid
  C-term NH2
LTFAEYWAQGAAAAAAA

SEQ ID NO: 531 - protein, 17 aa, Artificial Sequence
  Description of Artificial Sequence: Synthetic peptide
  N-term Ac
  MOD_RES (4)..(4): Alpha-Me R8-octenyl-alanine olefin amino acid connected by an all-carbon crosslinker comprising one double bond
  misc_feature (4)..(11): Crosslink between residues
  MOD_RES (10)..(10): Cyclohexyl-Ala
  MOD_RES (11)..(11): Alpha-Me S5-pentenyl-alanine olefin amino acid connected by an all-carbon crosslinker comprising one double bond
  MOD_RES (17)..(17): D-amino acid
  C-term NH2
LTFAEYWAQAAAAAAAA

SEQ ID NO: 532 - protein, 17 aa, Artificial Sequence
  Description of Artificial Sequence: Synthetic peptide
  N-term Ac
  MOD_RES (4)..(4): Alpha-Me R8-octenyl-alanine olefin amino acid connected by an all-carbon crosslinker comprising one double bond
  misc_feature (4)..(11): Crosslink between residues
  MOD_RES (10)..(10): homo-cyclohexyl-Ala
  MOD_RES (11)..(11): Alpha-Me S5-pentenyl-alanine olefin amino acid connected by an all-carbon crosslinker comprising one double bond
  MOD_RES (17)..(17): D-amino acid
  C-term NH2
LTFAEYWAQAAAAAAAA

SEQ ID NO: 533 - protein, 17 aa, Artificial Sequence
  Description of Artificial Sequence: Synthetic peptide
  N-term Ac
  MOD_RES (4)..(4): Alpha-Me R8-octenyl-alanine olefin amino acid connected by an all-carbon crosslinker comprising one double bond
  misc_feature (4)..(11): Crosslink between residues
  MOD_RES (11)..(11): Alpha-Me S5-pentenyl-alanine olefin amino acid connected by an all-carbon crosslinker comprising one double bond
  MOD_RES (17)..(17): D-amino acid
  C-term NH2
LTFAEYWAQFAAAAAAA

SEQ ID NO: 534 - protein, 17 aa, Artificial Sequence
  Description of Artificial Sequence: Synthetic peptide
  N-term Ac
  MOD_RES (4)..(4): Alpha-Me R8-octenyl-alanine olefin amino acid connected by an all-carbon crosslinker comprising one double bond
  misc_feature (4)..(11): Crosslink between residues
  MOD_RES (10)..(10): homo-Phe
  MOD_RES (11)..(11): Alpha-Me S5-pentenyl-alanine olefin amino acid connected by an all-carbon crosslinker comprising one double bond
  MOD_RES (17)..(17): D-amino acid
  C-term NH2
LTFAEYWAQFAAAAAAA

SEQ ID NO: 535 - protein, 17 aa, Artificial Sequence
  Description of Artificial Sequence: Synthetic peptide
  N-term Ac
  MOD_RES (4)..(4): Alpha-Me R8-octenyl-alanine olefin amino acid connected by an all-carbon crosslinker comprising one double bond
  misc_feature (4)..(11): Crosslink between residues
  MOD_RES (11)..(11): Alpha-Me S5-pentenyl-alanine olefin amino acid connected by an all-carbon crosslinker comprising one double bond
  MOD_RES (14)..(14): Norleucine
  MOD_RES (17)..(17): D-amino acid
  C-term NH2
LTFAEYWAQLAAALAAA

SEQ ID NO: 536 - protein, 17 aa, Artificial Sequence
  Description of Artificial Sequence: Synthetic peptide
  N-term Ac
  MOD_RES (4)..(4): Alpha-Me R8-octenyl-alanine olefin amino acid connected by an all-carbon crosslinker comprising one double bond
  misc_feature (4)..(11): Crosslink between residues
  MOD_RES (10)..(10): Adamantyl-Gly
  MOD_RES (11)..(11): Alpha-Me S5-pentenyl-alanine olefin amino acid connected by an all-carbon crosslinker comprising one double bond
  MOD_RES (14)..(14): Norleucine
  MOD_RES (17)..(17): D-amino acid
  C-term NH2
LTFAEYWAQGAAALAAA

SEQ ID NO: 537 - protein, 18 aa, Artificial Sequence
  Description of Artificial Sequence: Synthetic peptide
  N-term 4FBz
  MOD_RES (1)..(1): Beta-Ala
  MOD_RES (5)..(5): Alpha-Me R8-octenyl-alanine olefin amino acid connected by an all-carbon crosslinker comprising one double bond
  misc_feature (5)..(12): Crosslink between residues
  MOD_RES (12)..(12): Alpha-Me S5-pentenyl-alanine olefin amino acid connected by an all-carbon crosslinker comprising one double bond
  MOD_RES (18)..(18): D-amino acid
  C-term NH2
ALTFAEYWAQLAAAAAAA

SEQ ID NO: 538 - protein, 15 aa, Artificial Sequence
  Description of Artificial Sequence: Synthetic peptide
  N-term 4FBz
  MOD_RES (1)..(1): Beta-Ala
  MOD_RES (5)..(5): Alpha-Me R8-octenyl-alanine olefin amino acid connected by an all-carbon crosslinker comprising one double bond
  misc_feature (5)..(12): Crosslink between residues
  MOD_RES (11)..(11): Cyclobutyl-Ala
  MOD_RES (12)..(12): Alpha-Me S5-pentenyl-alanine olefin amino acid connected by an all-carbon crosslinker comprising one double bond
  C-term NH2
ALTFAEYWAQAASAA

SEQ ID NO: 539 - protein, 17 aa, Artificial Sequence
  Description of Artificial Sequence: Synthetic peptide
  N-term Ac
  MOD_RES (4)..(4): Alpha-Me R5-pentenyl-alanine olefin amino acid connected by an all-carbon crosslinker comprising one double bond
  misc_feature (4)..(11): Crosslink between residues
  MOD_RES (11)..(11): Alpha-Me S8-octenyl-alanine olefin amino acid connected by an all-carbon crosslinker comprising one double bond
  MOD_RES (17)..(17): D-amino acid
  C-term NH2
LTFAEYWAQLAAAAAAA

SEQ ID NO: 540 - protein, 14 aa, Artificial Sequence
  Description of Artificial Sequence: Synthetic peptide
  N-term Ac
  MOD_RES (4)..(4): Alpha-Me R5-pentenyl-alanine olefin amino acid connected by an all-carbon crosslinker comprising one double bond
  misc_feature (4)..(11): Crosslink between residues
  MOD_RES (10)..(10): Cyclobutyl-Ala
  MOD_RES (11)..(11): Alpha-Me S8-octenyl-alanine olefin amino acid connected by an all-carbon crosslinker comprising one double bond
  C-term NH2
LTFAEYWAQAASAA

SEQ ID NO: 541 - protein, 17 aa, Artificial Sequence
  Description of Artificial Sequence: Synthetic peptide
  N-term Ac
  MOD_RES (4)..(4): Alpha-Me R8-octenyl-alanine olefin amino acid connected by an all-carbon crosslinker comprising one double bond
  misc_feature (4)..(11): Crosslink between residues
  MOD_RES (11)..(11): Alpha-Me S5-pentenyl-alanine olefin amino acid connected by an all-carbon crosslinker comprising one double bond
  MOD_RES (14)..(14): hhLeu
  MOD_RES (17)..(17): D-amino acid
  C-term NH2
LTFAEYWAQLAAALAAA

SEQ ID NO: 542 - protein, 19 aa, Artificial Sequence
  Description of Artificial Sequence: Synthetic peptide
  N-term Ac
  MOD_RES (4)..(4): Alpha-Me R8-octenyl-alanine olefin amino acid connected by an all-carbon crosslinker comprising one double bond
  misc_feature (4)..(11): Crosslink between residues
  MOD_RES (11)..(11): Alpha-Me S5-pentenyl-alanine olefin amino acid connected by an all-carbon crosslinker comprising one double bond
  MOD_RES (19)..(19): D-amino acid
  C-term NH2
LTFAEYWAQLAAAAAAAAA

SEQ ID NO: 543 - protein, 20 aa, Artificial Sequence
  Description of Artificial Sequence: Synthetic peptide
  N-term Ac
  MOD_RES (4)..(4): Alpha-Me R8-octenyl-alanine olefin amino acid connected by an all-carbon crosslinker comprising one double bond
  misc_feature (4)..(11): Crosslink between residues
  MOD_RES (11)..(11): Alpha-Me S5-pentenyl-alanine olefin amino acid connected by an all-carbon crosslinker comprising one double bond
  MOD_RES (20)..(20): D-amino acid
  C-term NH2
LTFAEYWAQLAAAAAAAAAA

SEQ ID NO: 544 - protein, 21 aa, Artificial Sequence
  Description of Artificial Sequence: Synthetic peptide
  N-term Ac
  MOD_RES (4)..(4): Alpha-Me R8-octenyl-alanine olefin amino acid connected by an all-carbon crosslinker comprising one double bond
  misc_feature (4)..(11): Crosslink between residues
  MOD_RES (11)..(11): Alpha-Me S5-pentenyl-alanine olefin amino acid connected by an all-carbon crosslinker comprising one double bond
  MOD_RES (21)..(21): D-amino acid
  C-term NH2
LTFAEYWAQLAAAAAAAAAAA

SEQ ID NO: 545 - protein, 14 aa, Artificial Sequence
  Description of Artificial Sequence: Synthetic peptide
  N-term Ac
  MOD_RES (4)..(4): Alpha-Me R8-octenyl-alanine olefin amino acid connected by an all-carbon crosslinker comprising one double bond
  misc_feature (4)..(11): Crosslink between residues
  MOD_RES (10)..(10): Cyclobutyl-Ala
  MOD_RES (11)..(11): Alpha-Me S5-pentenyl-alanine olefin amino acid connected by an all-carbon crosslinker comprising one double bond
  C-term NH2
LTAAEYAAQAASAA

SEQ ID NO: 546 - protein, 17 aa, Artificial Sequence
  Description of Artificial Sequence: Synthetic peptide
  N-term Ac
  MOD_RES (4)..(4): Alpha-Me R8-octenyl-alanine olefin amino acid connected by an all-carbon crosslinker comprising one double bond
  misc_feature (4)..(11): Crosslink between residues
  MOD_RES (11)..(11): Alpha-Me S5-pentenyl-alanine olefin amino acid connected by an all-carbon crosslinker comprising one double bond
  MOD_RES (17)..(17): D-amino acid
  C-term NH2
LTAAEYAAQLAAAAAAA

SEQ ID NO: 547 - protein, 17 aa, Artificial Sequence
  Description of Artificial Sequence: Synthetic peptide
  N-term Ac
  MOD_RES (4)..(4): Alpha-Me R8-octenyl-alanine olefin amino acid connected by an all-carbon crosslinker comprising one double bond
  misc_feature (4)..(11): Crosslink between residues
  MOD_RES (6)..(6): Pmp
  MOD_RES (11)..(11): Alpha-Me S5-pentenyl-alanine olefin amino acid connected by an all-carbon crosslinker comprising one double bond
  MOD_RES (17)..(17): D-amino acid
  C-term NH2
LTFAEXWAQLAAAAAAA

SEQ ID NO: 548 - protein, 14 aa, Artificial Sequence
  Description of Artificial Sequence: Synthetic peptide
  N-term Ac
  MOD_RES (4)..(4): Alpha-Me R8-octenyl-alanine olefin amino acid connected by an all-carbon crosslinker comprising one double bond
  misc_feature (4)..(11): Crosslink between residues
  MOD_RES (6)..(6): Pmp
  MOD_RES (10)..(10): Cyclobutyl-Ala
  MOD_RES (11)..(11): Alpha-Me S5-pentenyl-alanine olefin amino acid connected by an all-carbon crosslinker comprising one double bond
  C-term NH2
LTFAEXWAQAASAA

SEQ ID NO: 549 - protein, 12 aa, Artificial Sequence
  Description of Artificial Sequence: Synthetic peptide
  N-term Ac
  MOD_RES (4)..(4): Alpha-Me R8-octenyl-alanine olefin amino acid connected by an all-carbon crosslinker comprising one double bond
  misc_feature (4)..(11): Crosslink between residues
  MOD_RES (11)..(11): Alpha-Me S5-pentenyl-alanine olefin amino acid connected by an all-carbon crosslinker comprising one double bond
  C-term NH2
ATFAHYWAQLAS

SEQ ID NO: 550 - protein, 12 aa, Artificial Sequence
  Description of Artificial Sequence: Synthetic peptide
  N-term Ac
  MOD_RES (4)..(4): Alpha-Me R8-octenyl-alanine olefin amino acid connected by an all-carbon crosslinker comprising one double bond
  misc_feature (4)..(11): Crosslink between residues
  MOD_RES (11)..(11): Alpha-Me S5-pentenyl-alanine olefin amino acid connected by an all-carbon crosslinker comprising one double bond
  C-term NH2
LTFAHAWAQLAS

SEQ ID NO: 551 - protein, 12 aa, Artificial Sequence
  Description of Artificial Sequence: Synthetic peptide
  N-term Ac
  MOD_RES (4)..(4): Alpha-Me R8-octenyl-alanine olefin amino acid connected by an all-carbon crosslinker comprising one double bond
  misc_feature (4)..(11): Crosslink between residues
  MOD_RES (11)..(11): Alpha-Me S5-pentenyl-alanine olefin amino acid connected by an all-carbon crosslinker comprising one double bond
  C-term NH2
LTFAHYWAQAAS

SEQ ID NO: 552 - protein, 13 aa, Artificial Sequence
  Description of Artificial Sequence: Synthetic peptide
  N-term Ac
  MOD_RES (4)..(4): Alpha-Me R8-octenyl-alanine olefin amino acid connected by an all-carbon crosslinker comprising one double bond
  misc_feature (4)..(11): Crosslink between residues
  MOD_RES (10)..(10): Cyclobutyl-Ala
  MOD_RES (11)..(11): Alpha-Me S5-pentenyl-alanine olefin amino acid connected by an all-carbon crosslinker comprising one double bond
  C-term NH2
LTFAEYWAQAASA

SEQ ID NO: 553 - protein, 14 aa, Artificial Sequence
  Description of Artificial Sequence: Synthetic peptide
  N-term Ac
  MOD_RES (4)..(4): Alpha-Me R8-octenyl-alanine olefin amino acid connected by an all-carbon crosslinker comprising one double bond
  misc_feature (4)..(11): Crosslink between residues
  MOD_RES (11)..(11): Alpha-Me S5-pentenyl-alanine olefin amino acid connected by an all-carbon crosslinker comprising one double bond
  C-term NH2
LTFAEYWAQLASAA

SEQ ID NO: 554 - protein, 14 aa, Artificial Sequence
  Description of Artificial Sequence: Synthetic peptide
  N-term Ac
  MOD_RES (4)..(4): Alpha-Me R8-octenyl-alanine olefin amino acid connected by an all-carbon crosslinker comprising one double bond
  misc_feature (4)..(11): Crosslink between residues
  MOD_RES (10)..(10): Cyclobutyl-Ala
  MOD_RES (11)..(11): Alpha-Me S5-pentenyl-alanine olefin amino acid connected by an all-carbon crosslinker comprising one double bond
  C-term NH2
LTFAHYWAQAASAA

SEQ ID NO: 555 - protein, 14 aa, Artificial Sequence
  Description of Artificial Sequence: Synthetic peptide
  N-term Ac
  MOD_RES (4)..(4): Alpha-Me R8-octenyl-alanine olefin amino acid connected by an all-carbon crosslinker comprising one double bond
  misc_feature (4)..(11): Crosslink between residues
  MOD_RES (10)..(10): Cyclobutyl-Ala
  MOD_RES (11)..(11): Alpha-Me S5-pentenyl-alanine olefin amino acid connected by an all-carbon crosslinker comprising one double bond
  C-term NH2
LTFASYWAQAASAA

SEQ ID NO: 556 - protein, 14 aa, Artificial Sequence
  Description of Artificial Sequence: Synthetic peptide
  N-term Ac
  MOD_RES (4)..(4): Alpha-Me R8-octenyl-alanine olefin amino acid connected by an all-carbon crosslinker comprising one double bond
  misc_feature (4)..(11): Crosslink between residues
  MOD_RES (10)..(10): Cyclobutyl-Ala
  MOD_RES (11)..(11): Alpha-Me S5-pentenyl-alanine olefin amino acid connected by an all-carbon crosslinker comprising one double bond
  C-term NH2
LTFARYWAQAASAA

SEQ ID NO: 557 - protein, 14 aa, Artificial Sequence
  Description of Artificial Sequence: Synthetic peptide
  N-term Ac
  MOD_RES (4)..(4): Alpha-Me R8-octenyl-alanine olefin amino acid connected by an all-carbon crosslinker comprising one double bond
  misc_feature (4)..(11): Crosslink between residues
  MOD_RES (10)..(10): Cyclobutyl-Ala
  MOD_RES (11)..(11): Alpha-Me S5-pentenyl-alanine olefin amino acid connected by an all-carbon crosslinker comprising one double bond
  C-term NH2
LTFAKYWAQAASAA

SEQ ID NO: 558 - protein, 14 aa, Artificial Sequence
  Description of Artificial Sequence: Synthetic peptide
  N-term Ac
  MOD_RES (4)..(4): Alpha-Me R8-octenyl-alanine olefin amino acid connected by an all-carbon crosslinker comprising one double bond
  misc_feature (4)..(11): Crosslink between residues
  MOD_RES (10)..(10): Cyclobutyl-Ala
  MOD_RES (11)..(11): Alpha-Me S5-pentenyl-alanine olefin amino acid connected by an all-carbon crosslinker comprising one double bond
  C-term NH2
LTFAQYWAQAASAA

SEQ ID NO: 559 - protein, 14 aa, Artificial Sequence
  Description of Artificial Sequence: Synthetic peptide
  N-term Ac
  MOD_RES (4)..(4): Alpha-Me R8-octenyl-alanine olefin amino acid connected by an all-carbon crosslinker comprising one double bond
  misc_feature (4)..(11): Crosslink between residues
  MOD_RES (10)..(10): Cyclobutyl-Ala
  MOD_RES (11)..(11): Alpha-Me S5-pentenyl-alanine olefin amino acid connected by an all-carbon crosslinker comprising one double bond
  C-term NH2
LTFAEYWAAAASAA

SEQ ID NO: 560 - protein, 14 aa, Artificial Sequence
  Description of Artificial Sequence: Synthetic peptide
  N-term Ac
  MOD_RES (4)..(4): Alpha-Me R8-octenyl-alanine olefin amino acid connected by an all-carbon crosslinker comprising one double bond
  misc_feature (4)..(11): Crosslink between residues
  MOD_RES (10)..(10): Cyclobutyl-Ala
  MOD_RES (11)..(11): Alpha-Me S5-pentenyl-alanine olefin amino acid connected by an all-carbon crosslinker comprising one double bond
  C-term NH2
LTFAEYWAQAAAAA

SEQ ID NO: 561 - protein, 16 aa, Artificial Sequence
  Description of Artificial Sequence: Synthetic peptide
  N-term Ac
  MOD_RES (4)..(4): Alpha-Me R8-octenyl-alanine olefin amino acid connected by an all-carbon crosslinker comprising one double bond
  misc_feature (4)..(11): Crosslink between residues
  MOD_RES (11)..(11): Alpha-Me S5-pentenyl-alanine olefin amino acid connected by an all-carbon crosslinker comprising one double bond
  C-term OH
LTFAEYWAQLAAAAAA

SEQ ID NO: 562 - protein, 15 aa, Artificial Sequence
  Description of Artificial Sequence: Synthetic peptide
  N-term Ac
  MOD_RES (4)..(4): Alpha-Me R8-octenyl-alanine olefin amino acid connected by an all-carbon crosslinker comprising one double bond
  misc_feature (4)..(11): Crosslink between residues
  MOD_RES (11)..(11): Alpha-Me S5-pentenyl-alanine olefin amino acid connected by an all-carbon crosslinker comprising one double bond
  C-term OH
LTFAEYWAQLAAAAA

SEQ ID NO: 563 - protein, 13 aa, Artificial Sequence
  Description of Artificial Sequence: Synthetic peptide
  N-term Ac
  MOD_RES (4)..(4): Alpha-Me R8-octenyl-alanine olefin amino acid connected by an all-carbon crosslinker comprising one double bond
  misc_feature (4)..(11): Crosslink between residues
  MOD_RES (11)..(11): Alpha-Me S5-pentenyl-alanine olefin amino acid connected by an all-carbon crosslinker comprising one double bond
  C-term OH
LTFAEYWAQLAAA

SEQ ID NO: 564 - protein, 17 aa, Artificial Sequence
  Description of Artificial Sequence: Synthetic peptide
  N-term Ac
  MOD_RES (4)..(4): Alpha-Me R8-octenyl-alanine olefin amino acid connected by an all-carbon crosslinker comprising one double bond
  misc_feature (4)..(11): Crosslink between residues
  MOD_RES (6)..(6): Phe-4bOH2
  MOD_RES (11)..(11): Alpha-Me S5-pentenyl-alanine olefin amino acid connected by an all-carbon crosslinker comprising one double bond
  MOD_RES (17)..(17): D-amino acid
  C-term NH2
LTFAAFWAQLAAAAAAA

SEQ ID NO: 565 - protein, 17 aa, Artificial Sequence
  Description of Artificial Sequence: Synthetic peptide
  N-term Ac
  MOD_RES (4)..(4): Alpha-Me R8-octenyl-alanine olefin amino acid connected by an all-carbon crosslinker comprising one double bond
  misc_feature (4)..(11): Crosslink between residues
  MOD_RES (6)..(6): Phe-4bOH2
  MOD_RES (11)..(11): Alpha-Me S5-pentenyl-alanine olefin amino acid connected by an all-carbon crosslinker comprising one double bond
  MOD_RES (17)..(17): D-amino acid
  C-term NH2
LTFAAFWAALAAAAAAA

SEQ ID NO: 566 - protein, 14 aa, Artificial Sequence
  Description of Artificial Sequence: Synthetic peptide
  N-term Ac
  MOD_RES (4)..(4): Alpha-Me R8-octenyl-alanine olefin amino acid connected by an all-carbon crosslinker comprising one double bond
  misc_feature (4)..(11): Crosslink between residues
  MOD_RES (6)..(6): Phe-4bOH2
  MOD_RES (10)..(10): Cyclobutyl-Ala
  MOD_RES (11)..(11): Alpha-Me S5-pentenyl-alanine olefin amino acid connected by an all-carbon crosslinker comprising one double bond
  C-term NH2
LTFAEFWAQAASAA

SEQ ID NO: 567 - protein, 17 aa, Artificial Sequence
  Description of Artificial Sequence: Synthetic peptide
  N-term Ac
  MOD_RES (4)..(4): Alpha-Me R8-octenyl-alanine olefin amino acid connected by an all-carbon crosslinker comprising one double bond
  misc_feature (4)..(11): Crosslink between residues
  MOD_RES (6)..(6): pY
  MOD_RES (11)..(11): Alpha-Me S5-pentenyl-alanine olefin amino acid connected by an all-carbon crosslinker comprising one double bond
  MOD_RES (17)..(17): D-amino acid
  C-term NH2
LTFAAYWAQLAAAAAAA

SEQ ID NO: 568 - protein, 17 aa, Artificial Sequence
  Description of Artificial Sequence: Synthetic peptide
  N-term Ac
  MOD_RES (4)..(4): Alpha-Me R8-octenyl-alanine olefin amino acid connected by an all-carbon crosslinker comprising one double bond
  misc_feature (4)..(11): Crosslink between residues
  MOD_RES (6)..(6): pY
  MOD_RES (11)..(11): Alpha-Me S5-pentenyl-alanine olefin amino acid connected by an all-carbon crosslinker comprising one double bond
  MOD_RES (17)..(17): D-amino acid
  C-term NH2
LTFAAYWAALAAAAAAA

SEQ ID NO: 569 - protein, 14 aa, Artificial Sequence
  Description of Artificial Sequence: Synthetic peptide
  N-term Ac
  MOD_RES (4)..(4): Alpha-Me R8-octenyl-alanine olefin amino acid connected by an all-carbon crosslinker comprising one double bond
  misc_feature (4)..(11): Crosslink between residues
  MOD_RES (6)..(6): pY
  MOD_RES (10)..(10): Cyclobutyl-Ala
  MOD_RES (11)..(11): Alpha-Me S5-pentenyl-alanine olefin amino acid connected by an all-carbon crosslinker comprising one double bond
  C-term NH2
LTFAEYWAQAASAA

SEQ ID NO: 570 - protein, 17 aa, Artificial Sequence
  Description of Artificial Sequence: Synthetic peptide
  N-term Ac
  MOD_RES (4)..(4): Alpha-Me R6-hexynyl-alanine alkynyl amino acids, crosslink via a dialkyne bond with a second alkynyl amino acid
  misc_feature (4)..(11): Crosslink between residues
  MOD_RES (11)..(11): Alpha-Me S5-pentynyl-alanine alkynyl amino acids, wherein the alkyne forms one half of a dialkyne bond with a second alkynyl amino acid
  MOD_RES (17)..(17): D-amino acid
  C-term NH2
LTFAAYWAQLAAAAAAA

SEQ ID NO: 571 - protein, 14 aa, Artificial Sequence
  Description of Artificial Sequence: Synthetic peptide
  N-term Ac
  MOD_RES (4)..(4): Alpha-Me R6-hexynyl-alanine alkynyl amino acids, crosslink via a dialkyne bond with a second alkynyl amino acid
  misc_feature (4)..(11): Crosslink between residues
  MOD_RES (10)..(10): Cyclobutyl-Ala
  MOD_RES (11)..(11): Alpha-Me S5-pentynyl-alanine alkynyl amino acids, wherein the alkyne forms one half of a dialkyne bond with a second alkynyl amino acid
  C-term NH2
LTFAEYWAQAASAA

SEQ ID NO: 572 - protein, 17 aa, Artificial Sequence
  Description of Artificial Sequence: Synthetic peptide
  N-term Ac
  MOD_RES (4)..(4): Alpha-Me R6-hexynyl-alanine alkynyl amino acids, crosslink via a dialkyne bond with a second alkynyl amino acid
  misc_feature (4)..(11): Crosslink between residues
  MOD_RES (11)..(11): Alpha-Me S5-pentynyl-alanine alkynyl amino acids, wherein the alkyne forms one half of a dialkyne bond with a second alkynyl amino acid
  MOD_RES (17)..(17): D-amino acid
  C-term NH2
LTFAEYWAQLAAAAAAA

SEQ ID NO: 573 - protein, 17 aa, Artificial Sequence
  Description of Artificial Sequence: Synthetic peptide
  N-term Ac
  MOD_RES (4)..(4): Alpha-Me R9-nonynyl-alanine alkynyl amino acid crosslinked via an alkyne metathesis reaction with a second alkynyl amino acid
  misc_feature (4)..(11): Crosslink between residues
  MOD_RES (11)..(11): Alpha-Me S6-hexynyl-alanine alkynyl amino acid crosslinked via an alkyne metathesis reaction with a second alkynyl amino acid
  MOD_RES (17)..(17): D-amino acid
  C-term NH2
LTFAEYWAQLAAAAAAA

SEQ ID NO: 574 - protein, 17 aa, Artificial Sequence
  Description of Artificial Sequence: Synthetic peptide
  N-term Ac
  MOD_RES (4)..(4): Alpha-Me R9-nonynyl-alanine alkynyl amino acid crosslinked via an alkyne metathesis reaction with a second alkynyl amino acid
  misc_feature (4)..(11): Crosslink between residues
  MOD_RES (11)..(11): Alpha-Me S6-hexynyl-alanine alkynyl amino acid crosslinked via an alkyne metathesis reaction with a second alkynyl amino acid
  MOD_RES (17)..(17): D-amino acid
  C-term NH2
LTFAEYWAQLAAAAAAA

SEQ ID NO: 575 - protein, 14 aa, Artificial Sequence
  Description of Artificial Sequence: Synthetic peptide
  N-term Ac
  MOD_RES (4)..(4): Alpha-Me R9-nonynyl-alanine alkynyl amino acid crosslinked via an alkyne metathesis reaction with a second alkynyl amino acid
  misc_feature (4)..(11): Crosslink between residues
  MOD_RES (10)..(10): Cyclobutyl-Ala
  MOD_RES (11)..(11): Alpha-Me S6-hexynyl-alanine alkynyl amino acid crosslinked via an alkyne metathesis reaction with a second alkynyl amino acid
  C-term NH2
LTFAEYWAQAASAA

SEQ ID NO: 576 - protein, 14 aa, Artificial Sequence
  Description of Artificial Sequence: Synthetic peptide
  N-term Ac
  MOD_RES (4)..(4): Alpha-Me R9-nonynyl-alanine alkynyl amino acid crosslinked via an alkyne metathesis reaction with a second alkynyl amino acid
  misc_feature (4)..(11): Crosslink between residues
  MOD_RES (10)..(10): Cyclobutyl-Ala
  MOD_RES (11)..(11): Alpha-Me S6-hexynyl-alanine alkynyl amino acid crosslinked via an alkyne metathesis reaction with a second alkynyl amino acid
  C-term NH2
LTAAEYWAQAASAA

SEQ ID NO: 577 - protein, 15 aa, Artificial Sequence
  Description of Artificial Sequence: Synthetic peptide
  N-term 5-FAM
  MOD_RES (1)..(1): Beta-Ala
  MOD_RES (5)..(5): Alpha-Me R9-nonynyl-alanine alkynyl amino acid crosslinked via an alkyne metathesis reaction with a second alkynyl amino acid
  misc_feature (5)..(12): Crosslink between residues
  MOD_RES (11)..(11): Cyclobutyl-Ala
  MOD_RES (12)..(12): Alpha-Me S6-hexynyl-alanine alkynyl amino acid crosslinked via an alkyne metathesis reaction with a second alkynyl amino acid
  C-term NH2
ALTFAEYWAQAASAA

SEQ ID NO: 578 - protein, 18 aa, Artificial Sequence
  Description of Artificial Sequence: Synthetic peptide
  N-term 5-FAM
  MOD_RES (1)..(1): Beta-Ala
  MOD_RES (5)..(5): Alpha-Me R8-octenyl-alanine olefin amino acid connected by an all-carbon crosslinker comprising one double bond
  misc_feature (5)..(12): Crosslink between residues
  MOD_RES (12)..(12): Alpha-Me S5-pentenyl-alanine olefin amino acid connected by an all-carbon crosslinker comprising one double bond
  MOD_RES (18)..(18): D-amino acid
  C-term NH2
ALTFAEYWAQLAAAAAAA

SEQ ID NO: 579 - protein, 18 aa, Artificial Sequence
  Description of Artificial Sequence: Synthetic peptide
  N-term 5-FAM
  MOD_RES (1)..(1): Beta-Ala
  MOD_RES (5)..(5): Alpha-Me R8-octenyl-alanine olefin amino acid that is not connected by a crosslinker
  MOD_RES (12)..(12): Alpha-Me S5-pentenyl-alanine olefin amino acid that is not connected by a crosslinker
  MOD_RES (18)..(18): D-amino acid
  C-term NH2
ALTFAEYWAQLAAAAAAA

SEQ ID NO: 580 - protein, 18 aa, Artificial Sequence
  Description of Artificial Sequence: Synthetic peptide
  N-term 5-FAM
  MOD_RES (1)..(1): Beta-Ala
  MOD_RES (5)..(5): Alpha-Me R8-octenyl-alanine olefin amino acid connected by an all-carbon crosslinker comprising one double bond
  misc_feature (5)..(12): Crosslink between residues
  MOD_RES (12)..(12): Alpha-Me S5-pentenyl-alanine olefin amino acid connected by an all-carbon crosslinker comprising one double bond
  MOD_RES (18)..(18): D-amino acid
  C-term NH2
ALTAAEYWAQLAAAAAAA

SEQ ID NO: 581 - protein, 18 aa, Artificial Sequence
  Description of Artificial Sequence: Synthetic peptide
  N-term 5-FAM
  MOD_RES (1)..(1): Beta-Ala
  MOD_RES (5)..(5): Alpha-Me R8-octenyl-alanine olefin amino acid connected by an all-carbon crosslinker comprising one double bond
  misc_feature (5)..(12): Crosslink between residues
  MOD_RES (12)..(12): Alpha-Me S5-pentenyl-alanine olefin amino acid connected by an all-carbon crosslinker comprising one double bond
  MOD_RES (18)..(18): D-amino acid
  C-term NH2
ALTFAAYWAQLAAAAAAA

SEQ ID NO: 582 - protein, 18 aa, Artificial Sequence
  Description of Artificial Sequence: Synthetic peptide
  N-term 5-FAM
  MOD_RES (1)..(1): Beta-Ala
  MOD_RES (5)..(5): Alpha-Me R8-octenyl-alanine olefin amino acid connected by an all-carbon crosslinker comprising one double bond
  misc_feature (5)..(12): Crosslink between residues
  MOD_RES (12)..(12): Alpha-Me S5-pentenyl-alanine olefin amino acid connected by an all-carbon crosslinker comprising one double bond
  MOD_RES (18)..(18): D-amino acid
  C-term NH2
AATFAEYWAQLAAAAAAA

SEQ ID NO: 583 - protein, 18 aa, Artificial Sequence
  Description of Artificial Sequence: Synthetic peptide
  N-term 5-FAM
  MOD_RES (1)..(1): Beta-Ala
  MOD_RES (5)..(5): Alpha-Me R8-octenyl-alanine olefin amino acid connected by an all-carbon crosslinker comprising one double bond
  misc_feature (5)..(12): Crosslink between residues
  MOD_RES (12)..(12): Alpha-Me S5-pentenyl-alanine olefin amino acid connected by an all-carbon crosslinker comprising one double bond
  MOD_RES (18)..(18): D-amino acid
  C-term NH2
ALAFAEYWAQLAAAAAAA

SEQ ID NO: 584 - protein, 18 aa, Artificial Sequence
  Description of Artificial Sequence: Synthetic peptide
  N-term 5-FAM
  MOD_RES (1)..(1): Beta-Ala
  MOD_RES (5)..(5): Alpha-Me R8-octenyl-alanine olefin amino acid connected by an all-carbon crosslinker comprising one double bond
  misc_feature (5)..(12): Crosslink between residues
  MOD_RES (12)..(12): Alpha-Me S5-pentenyl-alanine olefin amino acid connected by an all-carbon crosslinker comprising one double bond
  MOD_RES (18)..(18): D-amino acid
  C-term NH2
ALTFAEAWAQLAAAAAAA

SEQ ID NO: 585 - protein, 18 aa, Artificial Sequence
  Description of Artificial Sequence: Synthetic peptide
  N-term 5-FAM
  MOD_RES (1)..(1): Beta-Ala
  MOD_RES (5)..(5): Alpha-Me R8-octenyl-alanine olefin amino acid connected by an all-carbon crosslinker comprising one double bond
  misc_feature (5)..(12): Crosslink between residues
  MOD_RES (12)..(12): Alpha-Me S5-pentenyl-alanine olefin amino acid connected by an all-carbon crosslinker comprising one double bond
  MOD_RES (18)..(18): D-amino acid
  C-term NH2
ALTFAEYAAQLAAAAAAA

SEQ ID NO: 586 - protein, 18 aa, Artificial Sequence
  Description of Artificial Sequence: Synthetic peptide
  N-term 5-FAM
  MOD_RES (1)..(1): Beta-Ala
  MOD_RES (5)..(5): Alpha-Me R8-octenyl-alanine olefin amino acid connected by an all-carbon crosslinker comprising one double bond
  misc_feature (5)..(12): Crosslink between residues
  MOD_RES (12)..(12): Alpha-Me S5-pentenyl-alanine olefin amino acid connected by an all-carbon crosslinker comprising one double bond
  MOD_RES (18)..(18): D-amino acid
  C-term NH2
ALTAAEYAAQLAAAAAAA

SEQ ID NO: 587 - protein, 18 aa, Artificial Sequence
  Description of Artificial Sequence: Synthetic peptide
  N-term 5-FAM
  MOD_RES (1)..(1): Beta-Ala
  MOD_RES (5)..(5): Alpha-Me R8-octenyl-alanine olefin amino acid connected by an all-carbon crosslinker comprising one double bond
  misc_feature (5)..(12): Crosslink between residues
  MOD_RES (12)..(12): Alpha-Me S5-pentenyl-alanine olefin amino acid connected by an all-carbon crosslinker comprising one double bond
  MOD_RES (18)..(18): D-amino acid
  C-term NH2
ALTFAEYWAALAAAAAAA

SEQ ID NO: 588 - protein, 18 aa, Artificial Sequence
  Description of Artificial Sequence: Synthetic peptide
  N-term 5-FAM
  MOD_RES (1)..(1): Beta-Ala
  MOD_RES (5)..(5): Alpha-Me R8-octenyl-alanine olefin amino acid connected by an all-carbon crosslinker comprising one double bond
  misc_feature (5)..(12): Crosslink between residues
  MOD_RES (12)..(12): Alpha-Me S5-pentenyl-alanine olefin amino acid connected by an all-carbon crosslinker comprising one double bond
  MOD_RES (18)..(18): D-amino acid
  C-term NH2
ALTFAEYWAQAAAAAAAA

SEQ ID NO: 589 - protein, 15 aa, Artificial Sequence
  Description of Artificial Sequence: Synthetic peptide
  N-term 5-FAM
  MOD_RES (1)..(1): Beta-Ala
  MOD_RES (5)..(5): Alpha-Me R8-octenyl-alanine olefin amino acid that is not connected by a crosslinker
  MOD_RES (11)..(11): Cyclobutyl-Ala
  MOD_RES (12)..(12): Alpha-Me S5-pentenyl-alanine olefin amino acid that is not connected by a crosslinker
  C-term NH2
ALTFAEYWAQAASAA

SEQ ID NO: 590 - protein, 15 aa, Artificial Sequence
  Description of Artificial Sequence: Synthetic peptide
  N-term 5-FAM
  MOD_RES (1)..(1): Beta-Ala
  MOD_RES (5)..(5): Alpha-Me R8-octenyl-alanine olefin amino acid connected by an all-carbon crosslinker comprising one double bond
  misc_feature (5)..(12): Crosslink between residues
  MOD_RES (11)..(11): Cyclobutyl-Ala
  MOD_RES (12)..(12): Alpha-Me S5-pentenyl-alanine olefin amino acid connected by an all-carbon crosslinker comprising one double bond
  C-term NH2
ALTAAEYWAQAASAA

SEQ ID NO: 591 - protein, 15 aa, Artificial Sequence
  Description of Artificial Sequence: Synthetic peptide
  N-term 5-FAM
  MOD_RES (1)..(1): Beta-Ala
  MOD_RES (5)..(5): Alpha-Me R8-octenyl-alanine olefin amino acid connected by an all-carbon crosslinker comprising one double bond
  misc_feature (5)..(12): Crosslink between residues
  MOD_RES (11)..(11): Cyclobutyl-Ala
  MOD_RES (12)..(12): Alpha-Me S5-pentenyl-alanine olefin amino acid connected by an all-carbon crosslinker comprising one double bond
  C-term NH2
ALTFAEYAAQAASAA

SEQ ID NO: 592 - protein, 15 aa, Artificial Sequence
  Description of Artificial Sequence: Synthetic peptide
  N-term 5-FAM
  MOD_RES (1)..(1): Beta-Ala
  MOD_RES (5)..(5): Alpha-Me R8-octenyl-alanine olefin amino acid connected by an all-carbon crosslinker comprising one double bond
  misc_feature (5)..(12): Crosslink between residues
  MOD_RES (11)..(11): Cyclobutyl-Ala
  MOD_RES (12)..(12): Alpha-Me S5-pentenyl-alanine olefin amino acid connected by an all-carbon crosslinker comprising one double bond
  C-term NH2
ALTAAEYAAQAASAA

SEQ ID NO: 593 - protein, 17 aa, Artificial Sequence
  Description of Artificial Sequence: Synthetic peptide
  N-term 5-FAM
  MOD_RES (1)..(1): Beta-Ala
  MOD_RES (8)..(8): Alpha-Me R8-octenyl-alanine olefin amino acid connected by an all-carbon crosslinker comprising one double bond
  misc_feature (8)..(15): Crosslink between residues
  MOD_RES (15)..(15): Alpha-Me S5-pentenyl-alanine olefin amino acid connected by an all-carbon crosslinker comprising one double bond
  C-term NH2
AQSQQTFANLWRLLAQN

SEQ ID NO: 594 - protein, 15 aa, Artificial Sequence
  Description of Artificial Sequence: Synthetic peptide
  N-term 5-TAMRA
  MOD_RES (1)..(1): Beta-Ala
  MOD_RES (5)..(5): Alpha-Me R8-octenyl-alanine olefin amino acid connected by an all-carbon crosslinker comprising one double bond
  misc_feature (5)..(12): Crosslink between residues
  MOD_RES (11)..(11): Cyclobutyl-Ala
  MOD_RES (12)..(12): Alpha-Me S5-pentenyl-alanine olefin amino acid connected by an all-carbon crosslinker comprising one double bond
  C-term NH2
ALTFAEYWAQAASAA

SEQ ID NO: 595 - protein, 15 aa, Artificial Sequence
  Description of Artificial Sequence: Synthetic peptide
  N-term 5-TAMRA
  MOD_RES (1)..(1): Beta-Ala
  MOD_RES (5)..(5): Alpha-Me R8-octenyl-alanine olefin amino acid connected by an all-carbon crosslinker comprising one double bond
  misc_feature (5)..(12): Crosslink between residues
  MOD_RES (11)..(11): Cyclobutyl-Ala
  MOD_RES (12)..(12): Alpha-Me S5-pentenyl-alanine olefin amino acid connected by an all-carbon crosslinker comprising one double bond
  C-term NH2
ALTAAEYWAQAASAA

SEQ ID NO: 596 - protein, 15 aa, Artificial Sequence
  Description of Artificial Sequence: Synthetic peptide
  N-term 5-TAMRA
  MOD_RES (1)..(1): Beta-Ala
  MOD_RES (5)..(5): Alpha-Me R8-octenyl-alanine olefin amino acid connected by an all-carbon crosslinker comprising one double bond
  misc_feature (5)..(12): Crosslink between residues
  MOD_RES (11)..(11): Cyclobutyl-Ala
  MOD_RES (12)..(12): Alpha-Me S5-pentenyl-alanine olefin amino acid connected by an all-carbon crosslinker comprising one double bond
  C-term NH2
ALTFAEYAAQAASAA

SEQ ID NO: 597 - protein, 15 aa, Artificial Sequence
  Description of Artificial Sequence: Synthetic peptide
  N-term 5-TAMRA
  MOD_RES (1)..(1): Beta-Ala
  MOD_RES (5)..(5): Alpha-Me R8-octenyl-alanine olefin amino acid connected by an all-carbon crosslinker comprising one double bond
  misc_feature (5)..(12): Crosslink between residues
  MOD_RES (11)..(11): Cyclobutyl-Ala
  MOD_RES (12)..(12): Alpha-Me S5-pentenyl-alanine olefin amino acid connected by an all-carbon crosslinker comprising one double bond
  C-term NH2
ALTAAEYAAQAASAA

SEQ ID NO: 598 - protein, 15 aa, Artificial Sequence
  Description of Artificial Sequence: Synthetic peptide
  N-term 5-TAMRA
  MOD_RES (1)..(1): Beta-Ala
  MOD_RES (5)..(5): Alpha-Me R8-octenyl-alanine olefin amino acid that is not connected by a crosslinker
  MOD_RES (11)..(11): Cyclobutyl-Ala
  MOD_RES (12)..(12): Alpha-Me S5-pentenyl-alanine olefin amino acid that is not connected by a crosslinker
  C-term NH2
ALTFAEYWAQAASAA

SEQ ID NO: 599 - protein, 18 aa, Artificial Sequence
  Description of Artificial Sequence: Synthetic peptide
  N-term 5-TAMRA
  MOD_RES (1)..(1): Beta-Ala
  MOD_RES (5)..(5): Alpha-Me R8-octenyl-alanine olefin amino acid connected by an all-carbon crosslinker comprising one double bond
  misc_feature (5)..(12): Crosslink between residues
  MOD_RES (12)..(12): Alpha-Me S5-pentenyl-alanine olefin amino acid connected by an all-carbon crosslinker comprising one double bond
  MOD_RES (18)..(18): D-amino acid
  C-term NH2
ALTFAEYWAQLAAAAAAA

SEQ ID NO: 600 - protein, 18 aa, Artificial Sequence
  Description of Artificial Sequence: Synthetic peptide
  N-term 5-TAMRA
  MOD_RES (1)..(1): Beta-Ala
  MOD_RES (5)..(5): Alpha-Me R8-octenyl-alanine olefin amino acid connected by an all-carbon crosslinker comprising one double bond
  misc_feature (5)..(12): Crosslink between residues
  MOD_RES (12)..(12): Alpha-Me S5-pentenyl-alanine olefin amino acid connected by an all-carbon crosslinker comprising one double bond
  MOD_RES (18)..(18): D-amino acid
  C-term NH2
ALTAAEYWAQLAAAAAAA

SEQ ID NO: 601 - protein, 18 aa, Artificial Sequence
  Description of Artificial Sequence: Synthetic peptide
  N-term 5-TAMRA
  MOD_RES (1)..(1): Beta-Ala
  MOD_RES (5)..(5): Alpha-Me R8-octenyl-alanine olefin amino acid that is not connected by a crosslinker
  MOD_RES (12)..(12): Alpha-Me S5-pentenyl-alanine olefin amino acid that is not connected by a crosslinker
  MOD_RES (18)..(18): D-amino acid
  C-term NH2
ALTFAEYWAQLAAAAAAA

SEQ ID NO: 602 - protein, 14 aa, Artificial Sequence
  Description of Artificial Sequence: Synthetic peptide
  N-term Ac
  MOD_RES (4)..(4): Alpha-Me R8-octenyl-alanine olefin amino acid connected by an all-carbon crosslinker comprising one double bond
  misc_feature (4)..(11): Crosslink between residues
  MOD_RES (8)..(8): Cou7
  MOD_RES (10)..(10): Cyclobutyl-Ala
  MOD_RES (11)..(11): Alpha-Me S5-pentenyl-alanine olefin amino acid connected by an all-carbon crosslinker comprising one double bond
  C-term OH
LTFAEYWXQAASAA

SEQ ID NO: 603 - protein, 12 aa, Artificial Sequence
  Description of Artificial Sequence: Synthetic peptide
  N-term Ac
  MOD_RES (4)..(4): Alpha-Me R8-octenyl-alanine olefin amino acid connected by an all-carbon crosslinker comprising one double bond
  misc_feature (4)..(11): Crosslink between residues
  MOD_RES (8)..(8): Cou7
  MOD_RES (10)..(10): Cyclobutyl-Ala
  MOD_RES (11)..(11): Alpha-Me S5-pentenyl-alanine olefin amino acid connected by an all-carbon crosslinker comprising one double bond
  C-term OH
LTFAEYWXQAAS

SEQ ID NO: 604 - protein, 14 aa, Artificial Sequence
  Description of Artificial Sequence: Synthetic peptide
  N-term Ac
  MOD_RES (4)..(4): Alpha-Me R8-octenyl-alanine olefin amino acid connected by an all-carbon crosslinker comprising one double bond
  misc_feature (4)..(11): Crosslink between residues
  MOD_RES (8)..(8): Cou7
  MOD_RES (10)..(10): Cyclobutyl-Ala
  MOD_RES (11)..(11): Alpha-Me S5-pentenyl-alanine olefin amino acid connected by an all-carbon crosslinker comprising one double bond
  C-term NH2
LTAAEYWXQAASAA

SEQ ID NO: 605 - protein, 14 aa, Artificial Sequence
  Description of Artificial Sequence: Synthetic peptide
  N-term Ac
  MOD_RES (4)..(4): Alpha-Me R8-octenyl-alanine olefin amino acid connected by an all-carbon crosslinker comprising one double bond
  misc_feature (4)..(11): Crosslink between residues
  MOD_RES (8)..(8): Cou7
  MOD_RES (10)..(10): Cyclobutyl-Ala
  MOD_RES (11)..(11): Alpha-Me S5-pentenyl-alanine olefin amino acid connected by an all-carbon crosslinker comprising one double bond
  C-term NH2
LTFAEYAXQAASAA

SEQ ID NO: 606 - protein, 14 aa, Artificial Sequence
  Description of Artificial Sequence: Synthetic peptide
  N-term Ac
  MOD_RES (4)..(4): Alpha-Me R8-octenyl-alanine olefin amino acid connected by an all-carbon crosslinker comprising one double bond
  misc_feature (4)..(11): Crosslink between residues
  MOD_RES (8)..(8): Cou7
  MOD_RES (10)..(10): Cyclobutyl-Ala
  MOD_RES (11)..(11): Alpha-Me S5-pentenyl-alanine olefin amino acid connected by an all-carbon crosslinker comprising one double bond
  C-term NH2
LTAAEYAXQAASAA

SEQ ID NO: 607 - protein, 14 aa, Artificial Sequence
  Description of Artificial Sequence: Synthetic peptide
  N-term Ac
  MOD_RES (4)..(4): Alpha-Me R8-octenyl-alanine olefin amino acid that is not connected by a crosslinker
  MOD_RES (8)..(8): Cou7
  MOD_RES (10)..(10): Cyclobutyl-Ala
  MOD_RES (11)..(11): Alpha-Me S5-pentenyl-alanine olefin amino acid that is not connected by a crosslinker
  C-term NH2
LTFAEYWXQAASAA

SEQ ID NO: 608 - protein, 17 aa, Artificial Sequence
  Description of Artificial Sequence: Synthetic peptide
  N-term Ac
  MOD_RES (4)..(4): Alpha-Me R8-octenyl-alanine olefin amino acid connected by an all-carbon crosslinker comprising one double bond
  misc_feature (4)..(11): Crosslink between residues
  MOD_RES (8)..(8): Cou7
  MOD_RES (11)..(11): Alpha-Me S5-pentenyl-alanine olefin amino acid connected by an all-carbon crosslinker comprising one double bond
  MOD_RES (17)..(17): D-amino acid
  C-term NH2
LTFAEYWXQLAAAAAAA

SEQ ID NO: 609 - protein, 17 aa, Artificial Sequence
  Description of Artificial Sequence: Synthetic peptide
  N-term Ac
  MOD_RES (4)..(4): Alpha-Me R8-octenyl-alanine olefin amino acid that is not connected by a crosslinker
  MOD_RES (8)..(8): Cou7
  MOD_RES (11)..(11): Alpha-Me S5-pentenyl-alanine olefin amino acid that is not connected by a crosslinker
  MOD_RES (17)..(17): D-amino acid
  C-term NH2
LTFAEYWXQLAAAAAAA

SEQ ID NO: 610 - protein, 16 aa, Artificial Sequence
  Description of Artificial Sequence: Synthetic peptide
  N-term Ac
  MOD_RES (4)..(4): Alpha-Me R8-octenyl-alanine olefin amino acid connected by an all-carbon crosslinker comprising one double bond
  misc_feature (4)..(11): Crosslink between residues
  MOD_RES (8)..(8): Cou7
  MOD_RES (11)..(11): Alpha-Me S5-pentenyl-alanine olefin amino acid connected by an all-carbon crosslinker comprising one double bond
  C-term OH
LTFAEYWXQLAAAAAA

SEQ ID NO: 611 - protein, 15 aa, Artificial Sequence
  Description of Artificial Sequence: Synthetic peptide
  N-term Ac
  MOD_RES (4)..(4): Alpha-Me R8-octenyl-alanine olefin amino acid connected by an all-carbon crosslinker comprising one double bond
  misc_feature (4)..(11): Crosslink between residues
  MOD_RES (8)..(8): Cou7
  MOD_RES (11)..(11): Alpha-Me S5-pentenyl-alanine olefin amino acid connected by an all-carbon crosslinker comprising one double bond
  C-term OH
LTFAEYWXQLAAAAA

SEQ ID NO: 612 - protein, 14 aa, Artificial Sequence
  Description of Artificial Sequence: Synthetic peptide
  N-term Ac
  MOD_RES (4)..(4): Alpha-Me R8-octenyl-alanine olefin amino acid connected by an all-carbon crosslinker comprising one double bond
  misc_feature (4)..(11): Crosslink between residues
  MOD_RES (8)..(8): Cou7
  MOD_RES (11)..(11): Alpha-Me S5-pentenyl-alanine olefin amino acid connected by an all-carbon crosslinker comprising one double bond
  C-term OH
LTFAEYWXQLAAAA

SEQ ID NO: 613 - protein, 13 aa, Artificial Sequence
  Description of Artificial Sequence: Synthetic peptide
  N-term Ac
  MOD_RES (4)..(4): Alpha-Me R8-octenyl-alanine olefin amino acid connected by an all-carbon crosslinker comprising one double bond
  misc_feature (4)..(11): Crosslink between residues
  MOD_RES (8)..(8): Cou7
  MOD_RES (11)..(11): Alpha-Me S5-pentenyl-alanine olefin amino acid connected by an all-carbon crosslinker comprising one double bond
  C-term OH
LTFAEYWXQLAAA

SEQ ID NO: 614 - protein, 12 aa, Artificial Sequence
  Description of Artificial Sequence: Synthetic peptide
  N-term Ac
  MOD_RES (4)..(4): Alpha-Me R8-octenyl-alanine olefin amino acid connected by an all-carbon crosslinker comprising one double bond
  misc_feature (4)..(11): Crosslink between residues
  MOD_RES (8)..(8): Cou7
  MOD_RES (11)..(11): Alpha-Me S5-pentenyl-alanine olefin amino acid connected by an all-carbon crosslinker comprising one double bond
  C-term OH
LTFAEYWXQLAA

SEQ ID NO: 615 - protein, 17 aa, Artificial Sequence
  Description of Artificial Sequence: Synthetic peptide
  N-term Ac
  MOD_RES (4)..(4): Alpha-Me R8-octenyl-alanine olefin amino acid connected by an all-carbon crosslinker comprising one double bond
  misc_feature (4)..(11): Crosslink between residues
  MOD_RES (11)..(11): Alpha-Me S5-pentenyl-alanine olefin amino acid connected by an all-carbon crosslinker comprising one double bond
  MOD_RES (17)..(17): D-amino acid
  C-term NH2
LTFAEYWAQLAAAAASA

SEQ ID NO: 616 - protein, 17 aa, Artificial Sequence
  Description of Artificial Sequence: Synthetic peptide
  N-term Ac
  MOD_RES (4)..(4): Alpha-Me R8-octenyl-alanine olefin amino acid connected by an all-carbon crosslinker comprising one double bond
  misc_feature (4)..(11): Crosslink between residues
  MOD_RES (11)..(11): Alpha-Me S5-pentenyl-alanine olefin amino acid connected by an all-carbon crosslinker comprising one double bond
  MOD_RES (17)..(17): D-amino acid
  C-term NH2
LTFAAYWAALAAAAAAA

SEQ ID NO: 617 - protein, 18 aa, Artificial Sequence
  Description of Artificial Sequence: Synthetic peptide
  N-term Biotin
  MOD_RES (1)..(1): Beta-Ala
  MOD_RES (5)..(5): Alpha-Me R8-octenyl-alanine olefin amino acid connected by an all-carbon crosslinker comprising one double bond
  misc_feature (5)..(12): Crosslink between residues
  MOD_RES (12)..(12): Alpha-Me S5-pentenyl-alanine olefin amino acid connected by an all-carbon crosslinker comprising one double bond
  MOD_RES (18)..(18): D-amino acid
  C-term NH2
ALTFAEYWAQLAAAAAAA

SEQ ID NO: 618 - protein, 12 aa, Artificial Sequence
  Description of Artificial Sequence: Synthetic peptide
  N-term Ac
  MOD_RES (4)..(4): Alpha-Me R8-octenyl-alanine olefin amino acid connected by an all-carbon crosslinker comprising one double bond
  misc_feature (4)..(11): Crosslink between residues
  MOD_RES (11)..(11): Alpha-Me S5-pentenyl-alanine olefin amino acid connected by an all-carbon crosslinker comprising one double bond
  C-term NH2
LTFAHAWAQLAS

SEQ ID NO: 619 - protein, 13 aa, Artificial Sequence
  Description of Artificial Sequence: Synthetic peptide
  N-term Ac
  MOD_RES (4)..(4): Alpha-Me R8-octenyl-alanine olefin amino acid connected by an all-carbon crosslinker comprising one double bond
  misc_feature (4)..(11): Crosslink between residues
  MOD_RES (10)..(10): Cyclobutyl-Ala
  MOD_RES (11)..(11): Alpha-Me S5-pentenyl-alanine olefin amino acid connected by an all-carbon crosslinker comprising one double bond
  C-term NH2
LTFAEYWAQAASA

SEQ ID NO: 620 - protein, 14 aa, Artificial Sequence
  Description of Artificial Sequence: Synthetic peptide
  N-term Ac
  MOD_RES (4)..(4): Alpha-Me R8-octenyl-alanine olefin amino acid connected by an all-carbon crosslinker comprising one double bond
  misc_feature (4)..(11): Crosslink between residues
  MOD_RES (10)..(10): Cyclobutyl-Ala
  MOD_RES (11)..(11): Alpha-Me S5-pentenyl-alanine olefin amino acid connected by an all-carbon crosslinker comprising one double bond
  C-term NH2
LTFAHYWAQAASAA

SEQ ID NO: 621 - protein, 14 aa, Artificial Sequence
  Description of Artificial Sequence: Synthetic peptide
  N-term Ac
  MOD_RES (4)..(4): Alpha-Me R8-octenyl-alanine olefin amino acid connected by an all-carbon crosslinker comprising one double bond
  misc_feature (4)..(11): Crosslink between residues
  MOD_RES (10)..(10): Cyclobutyl-Ala
  MOD_RES (11)..(11): Alpha-Me S5-pentenyl-alanine olefin amino acid connected by an all-carbon crosslinker comprising one double bond
  C-term NH2
LTFASYWAQAASAA

SEQ ID NO: 622 - protein, 14 aa, Artificial Sequence
  Description of Artificial Sequence: Synthetic peptide
  N-term Ac
  MOD_RES (4)..(4): Alpha-Me R8-octenyl-alanine olefin amino acid connected by an all-carbon crosslinker comprising one double bond
  misc_feature (4)..(11): Crosslink between residues
  MOD_RES (10)..(10): Cyclobutyl-Ala
  MOD_RES (11)..(11): Alpha-Me S5-pentenyl-alanine olefin amino acid connected by an all-carbon crosslinker comprising one double bond
  C-term NH2
LTFARYWAQAASAA

SEQ ID NO: 623 - protein, 14 aa, Artificial Sequence
  Description of Artificial Sequence: Synthetic peptide
  N-term Ac
  MOD_RES (4)..(4): Alpha-Me R8-octenyl-alanine olefin amino acid connected by an all-carbon crosslinker comprising one double bond
  misc_feature (4)..(11): Crosslink between residues
  MOD_RES (10)..(10): Cyclobutyl-Ala
  MOD_RES (11)..(11): Alpha-Me S5-pentenyl-alanine olefin amino acid connected by an all-carbon crosslinker comprising one double bond
  C-term NH2
LTFAKYWAQAASAA

SEQ ID NO: 624 - protein, 14 aa, Artificial Sequence
  Description of Artificial Sequence: Synthetic peptide
  N-term Ac
  MOD_RES (4)..(4): Alpha-Me R8-octenyl-alanine olefin amino acid connected by an all-carbon crosslinker comprising one double bond
  misc_feature (4)..(11): Crosslink between residues
  MOD_RES (10)..(10): Cyclobutyl-Ala
  MOD_RES (11)..(11): Alpha-Me S5-pentenyl-alanine olefin amino acid connected by an all-carbon crosslinker comprising one double bond
  C-term NH2
LTFAEYWAQAAAAA

SEQ ID NO: 625 - protein, 19 aa, Artificial Sequence
  Description of Artificial Sequence: Synthetic peptide
  N-term Ac
  MOD_RES (4)..(4): Alpha-Me R8-octenyl-alanine olefin amino acid connected by an all-carbon crosslinker comprising one double bond
  misc_feature (4)..(11): Crosslink between residues
  MOD_RES (11)..(11): Alpha-Me S5-pentenyl-alanine olefin amino acid connected by an all-carbon crosslinker comprising one double bond
  MOD_RES (17)..(17): D-amino acid
  MOD_RES (18)..(18): Beta-Ala
  C-term NH2
LTFAEYWAQLAAAAAAAAC

SEQ ID NO: 626 - protein, 19 aa, Artificial Sequence
  Description of Artificial Sequence: Synthetic peptide
  N-term Ac
  MOD_RES (4)..(4): Alpha-Me R8-octenyl-alanine olefin amino acid connected by an all-carbon crosslinker comprising one double bond
  misc_feature (4)..(11): Crosslink between residues
  MOD_RES (11)..(11): Alpha-Me S5-pentenyl-alanine olefin amino acid connected by an all-carbon crosslinker comprising one double bond
  MOD_RES (17)..(18): D-amino acid
  MOD_RES (19)..(19): Peg4C
  C-term NH2
LTFAEYWAQLAAAAAAADC

SEQ ID NO: 627 - protein, 17 aa, Artificial Sequence
  Description of Artificial Sequence: Synthetic peptide
  N-term Ac
  MOD_RES (4)..(4): Alpha-Me R8-octenyl-alanine olefin amino acid connected by an all-carbon crosslinker comprising one double bond
  misc_feature (4)..(11): Crosslink between residues
  MOD_RES (11)..(11): Alpha-Me S5-pentenyl-alanine olefin amino acid connected by an all-carbon crosslinker comprising one double bond
  MOD_RES (17)..(17): D-amino acid
  C-term NH2
LTAAAYWAALAAAAAAA

SEQ ID NO: 628 - protein, 17 aa, Artificial Sequence
  Description of Artificial Sequence: Synthetic peptide
  N-term Ac
  MOD_RES (4)..(4): Alpha-Me R8-octenyl-alanine olefin amino acid connected by an all-carbon crosslinker comprising one double bond
  misc_feature (4)..(11): Crosslink between residues
  MOD_RES (11)..(11): Alpha-Me S5-pentenyl-alanine olefin amino acid connected by an all-carbon crosslinker comprising one double bond
  MOD_RES (17)..(17): D-amino acid
  C-term NH2
LTFAAYAAALAAAAAAA

SEQ ID NO: 629 - protein, 18 aa, Artificial Sequence
  Description of Artificial Sequence: Synthetic peptide
  N-term 5-FAM
  MOD_RES (1)..(1): Beta-Ala
  MOD_RES (5)..(5): Alpha-Me R8-octenyl-alanine olefin amino acid connected by an all-carbon crosslinker comprising one double bond
  misc_feature (5)..(12): Crosslink between residues
  MOD_RES (12)..(12): Alpha-Me S5-pentenyl-alanine olefin amino acid connected by an all-carbon crosslinker comprising one double bond
  MOD_RES (18)..(18): D-amino acid
  C-term NH2
ALTFAAYWAALAAAAAAA

SEQ ID NO: 630 - protein, 17 aa, Artificial Sequence
  Description of Artificial Sequence: Synthetic peptide
  N-term Ac
  MOD_RES (4)..(4): Alpha-Me R8-octenyl-alanine olefin amino acid connected by an all-carbon crosslinker comprising one double bond
  misc_feature (4)..(11): Crosslink between residues
  MOD_RES (11)..(11): Alpha-Me S5-pentenyl-alanine olefin amino acid connected by an all-carbon crosslinker comprising one double bond
  MOD_RES (17)..(17): D-amino acid
  C-term NH2
LTAAAYWAQLAAAAAAA

SEQ ID NO: 631 - protein, 17 aa, Artificial Sequence
  Description of Artificial Sequence: Synthetic peptide
  N-term Ac
  MOD_RES (4)..(4): Alpha-Me R8-octenyl-alanine olefin amino acid connected by an all-carbon crosslinker comprising one double bond
  misc_feature (4)..(11): Crosslink between residues
  MOD_RES (11)..(11): Alpha-Me S5-pentenyl-alanine olefin amino acid connected by an all-carbon crosslinker comprising one double bond
  MOD_RES (17)..(17): D-amino acid
  C-term NH2
LTFAAYAAQLAAAAAAA

SEQ ID NO: 632 - protein, 17 aa, Artificial Sequence
  Description of Artificial Sequence: Synthetic peptide
  N-term Ac
  MOD_RES (4)..(4): Alpha-Me R6-hexynyl-alanine alkynyl amino acids, crosslink via a dialkyne bond with a second alkynyl amino acid
  misc_feature (4)..(11): Crosslink between residues
  MOD_RES (11)..(11): Alpha-Me S5-pentynyl-alanine alkynyl amino acids, wherein the alkyne forms one half of a dialkyne bond with a second alkynyl amino acid
  MOD_RES (17)..(17): D-amino acid
  C-term NH2
LTFAAYWAALAAAAAAA

SEQ ID NO: 633 - protein, 18 aa, Artificial Sequence
  Description of Artificial Sequence: Synthetic peptide
  N-term FITC
  MOD_RES (1)..(1): Beta-Ala
  MOD_RES (5)..(5): Alpha-Me R8-octenyl-alanine olefin amino acid connected by an all-carbon crosslinker comprising one double bond
  misc_feature (5)..(12): Crosslink between residues
  MOD_RES (12)..(12): Alpha-Me S5-pentenyl-alanine olefin amino acid connected by an all-carbon crosslinker comprising one double bond
  MOD_RES (18)..(18): D-amino acid
  C-term NH2
ALTFAEYWAQLAAAAAAA

SEQ ID NO: 634 - protein, 15 aa, Artificial Sequence
  Description of Artificial Sequence: Synthetic peptide
  N-term FITC
  MOD_RES (1)..(1): Beta-Ala
  MOD_RES (5)..(5): Alpha-Me R8-octenyl-alanine olefin amino acid connected by an all-carbon crosslinker comprising one double bond
  misc_feature (5)..(12): Crosslink between residues
  MOD_RES (11)..(11): Cyclobutyl-Ala
  MOD_RES (12)..(12): Alpha-Me S5-pentenyl-alanine olefin amino acid connected by an all-carbon crosslinker comprising one double bond
  C-term NH2
ALTFAEYWAQAASAA

SEQ ID NO: 635 - protein, 17 aa, Artificial Sequence
  Description of Artificial Sequence: Synthetic peptide
  N-term Ac
  MOD_RES (4)..(4): Alpha-Me R8-octenyl-alanine olefin amino acid connected by an all-carbon crosslinker comprising one double bond
  misc_feature (4)..(11): Crosslink between residues
  MOD_RES (11)..(11): Alpha-Me S5-pentenyl-alanine olefin amino acid connected by an all-carbon crosslinker comprising one double bond
  MOD_RES (17)..(17): D-amino acid
  C-term NH2
LTFAEYWAQLAEAAAAA

SEQ ID NO: 636 - protein, 17 aa, Artificial Sequence
  Description of Artificial Sequence: Synthetic peptide
  N-term Ac
  MOD_RES (4)..(4): Alpha-Me R8-octenyl-alanine olefin amino acid connected by an all-carbon crosslinker comprising one double bond
  misc_feature (4)..(11): Crosslink between residues
  MOD_RES (11)..(11): Alpha-Me S5-pentenyl-alanine olefin amino acid connected by an all-carbon crosslinker comprising one double bond
  MOD_RES (17)..(17): D-amino acid
  C-term NH2
LTFAAYWAQLAEAAAAA

SEQ ID NO: 637 - protein, 19 aa, Artificial Sequence
  Description of Artificial Sequence: Synthetic peptide
  N-term Ac
  MOD_RES (4)..(4): Alpha-Me R8-octenyl-alanine olefin amino acid connected by an all-carbon crosslinker comprising one double bond
  misc_feature (4)..(11): Crosslink between residues
  MOD_RES (11)..(11): Alpha-Me S5-pentenyl-alanine olefin amino acid connected by an all-carbon crosslinker comprising one double bond
  MOD_RES (17)..(17): D-amino acid
  MOD_RES (18)..(18): Beta-Ala
  MOD_RES (19)..(19): Lys-bio
  C-term NH2
LTFAEYWAQLAAAAAAAAK

SEQ ID NO: 638 - protein, 17 aa, Artificial Sequence
  Description of Artificial Sequence: Synthetic peptide
  N-term Ac
  MOD_RES (4)..(4): Alpha-Me R8-octenyl-alanine olefin amino acid connected by an all-carbon crosslinker comprising one double bond
  misc_feature (4)..(11): Crosslink between residues
  MOD_RES (11)..(11): Alpha-Me S5-pentenyl-alanine olefin amino acid connected by an all-carbon crosslinker comprising one double bond
  MOD_RES (17)..(17): D-amino acid
  C-term NH2
LTFAAYWAALAAAAAAA

SEQ ID NO: 639 - protein, 17 aa, Artificial Sequence
  Description of Artificial Sequence: Synthetic peptide
  N-term Ac
  MOD_RES (4)..(4): Alpha-Me R8-octenyl-alanine olefin amino acid connected by an all-carbon crosslinker comprising one double bond
  misc_feature (4)..(11): Crosslink between residues
  MOD_RES (11)..(11): Alpha-Me S5-pentenyl-alanine olefin amino acid connected by an all-carbon crosslinker comprising one double bond
  MOD_RES (17)..(17): D-amino acid
  C-term NH2
LTFAAYAAALAAAAAAA

SEQ ID NO: 640 - protein, 17 aa, Artificial Sequence
  Description of Artificial Sequence: Synthetic peptide
  N-term Ac
  MOD_RES (4)..(4): Alpha-Me R8-octenyl-alanine olefin amino acid connected by an all-carbon crosslinker comprising one double bond
  misc_feature (4)..(11): Crosslink between residues
  MOD_RES (11)..(11): Alpha-Me S5-pentenyl-alanine olefin amino acid connected by an all-carbon crosslinker comprising one double bond
  MOD_RES (17)..(17): D-amino acid
  C-term NH2
LTFAAYAAQLAAAAAAA

SEQ ID NO: 641 - protein, 17 aa, Artificial Sequence
  Description of Artificial Sequence: Synthetic peptide
  N-term Ac
  MOD_RES (4)..(4): Alpha-Me R8-octenyl-alanine olefin amino acid connected by an all-carbon crosslinker comprising one double bond
  misc_feature (4)..(11): Crosslink between residues
  MOD_RES (11)..(11): Alpha-Me S5-pentenyl-alanine olefin amino acid connected by an all-carbon crosslinker comprising one double bond
  MOD_RES (17)..(17): D-amino acid
  C-term NH2
LTFAEYWAQLAEAAAAA

SEQ ID NO: 642 - protein, 17 aa, Artificial Sequence
  Description of Artificial Sequence: Synthetic peptide
  N-term Ac
  MOD_RES (4)..(4): Alpha-Me R8-octenyl-alanine olefin amino acid connected by an all-carbon crosslinker comprising one double bond
  misc_feature (4)..(11): Crosslink between residues
  MOD_RES (11)..(11): Alpha-Me S5-pentenyl-alanine olefin amino acid connected by an all-carbon crosslinker comprising one double bond
  MOD_RES (17)..(17): D-amino acid
  C-term NH2
LTFAAYWAQLAEAAAAA

SEQ ID NO: 643 - protein, 17 aa, Artificial Sequence
  Description of Artificial Sequence: Synthetic peptide
  N-term Ac
  MOD_RES (4)..(4): Alpha-Me R8-octenyl-alanine olefin amino acid connected by an all-carbon crosslinker comprising one double bond
  misc_feature (4)..(11): Crosslink between residues
  MOD_RES (10)..(10): Cyclobutyl-Ala
  MOD_RES (11)..(11): Alpha-Me S5-pentenyl-alanine olefin amino acid connected by an all-carbon crosslinker comprising one double bond
  MOD_RES (17)..(17): D-amino acid
  C-term NH2
LTFAEYWAQAASAAAAA

SEQ ID NO: 644 - protein, 17 aa, Artificial Sequence
  Description of Artificial Sequence: Synthetic peptide
  N-term Ac
  MOD_RES (4)..(4): Alpha-Me R8-octenyl-alanine olefin amino acid connected by an all-carbon crosslinker comprising one double bond
  misc_feature (4)..(11): Crosslink between residues
  MOD_RES (11)..(11): Two pentenyl-alanine olefin side chains, each of which is crosslinked to another amino acid as indicated
  misc_feature (11)..(14): Crosslink between residues
  MOD_RES (15)..(15): Alpha-Me R5-pentenyl-alanine olefin amino acid connected by an all-carbon crosslinker comprising one double bond
  C-term NH2
LTFAEYWAQLAAAAAAA

SEQ ID NO: 645 - protein, 18 aa, Artificial Sequence
  Description of Artificial Sequence: Synthetic peptide
  N-term Ac
  MOD_RES (4)..(4): Alpha-Me R8-octenyl-alanine olefin amino acid connected by an all-carbon crosslinker comprising one double bond
  misc_feature (4)..(11): Crosslink between residues
  MOD_RES (11)..(11): Alpha-Me S5-pentenyl-alanine olefin amino acid connected by an all-carbon crosslinker comprising one double bond
  MOD_RES (13)..(13): Alpha-Me S5-pentenyl-alanine olefin amino acid connected by an all-carbon crosslinker comprising one double bond
  misc_feature (13)..(17): Crosslink between residues
  MOD_RES (17)..(17): Alpha-Me S5-pentenyl-alanine olefin amino acid connected by an all-carbon crosslinker comprising one double bond
  C-term NH2
LTFAEYWAQLAAAAAAAA

SEQ ID NO: 646 - protein, 19 aa, Artificial Sequence
  Description of Artificial Sequence: Synthetic peptide
  N-term Ac
  MOD_RES (4)..(4): Alpha-Me R8-octenyl-alanine olefin amino acid connected by an all-carbon crosslinker comprising one double bond
  misc_feature (4)..(11): Crosslink between residues
  MOD_RES (11)..(11): Alpha-Me S5-pentenyl-alanine olefin amino acid connected by an all-carbon crosslinker comprising one double bond
  MOD_RES (14)..(14): Alpha-Me S5-pentenyl-alanine olefin amino acid connected by an all-carbon crosslinker comprising one double bond
  misc_feature (14)..(18): Crosslink between residues
  MOD_RES (18)..(18): Alpha-Me S5-pentenyl-alanine olefin amino acid connected by an all-carbon crosslinker comprising one double bond
  C-term NH2
LTFAEYWAQLAAAAAAAAA

SEQ ID NO: 647 - protein, 20 aa, Artificial Sequence
  Description of Artificial Sequence: Synthetic peptide
  N-term Ac
  MOD_RES (4)..(4): Alpha-Me R8-octenyl-alanine olefin amino acid connected by an all-carbon crosslinker comprising one double bond
  misc_feature (4)..(11): Crosslink between residues
  MOD_RES (11)..(11): Alpha-Me S5-pentenyl-alanine olefin amino acid connected by an all-carbon crosslinker comprising one double bond
  MOD_RES (15)..(15): Alpha-Me S5-pentenyl-alanine olefin amino acid connected by an all-carbon crosslinker comprising one double bond
  misc_feature (15)..(19): Crosslink between residues
  MOD_RES (19)..(19): Alpha-Me S5-pentenyl-alanine olefin amino acid connected by an all-carbon crosslinker comprising one double bond
  C-term NH2
LTFAEYWAQLAAAAAAAAAA

SEQ ID NO: 648 - protein, 17 aa, Artificial Sequence
  Description of Artificial Sequence: Synthetic peptide
  N-term Ac
  MOD_RES (7)..(7): Alpha-Me R8-octenyl-alanine olefin amino acid connected by an all-carbon crosslinker comprising one double bond
  misc_feature (7)..(14): Crosslink between residues
  MOD_RES (14)..(14): Alpha-Me S5-pentenyl-alanine olefin amino acid connected by an all-carbon crosslinker comprising one double bond
  C-term OH
AAALTFAEYWAQLAAAA

SEQ ID NO: 649 - protein, 17 aa, Artificial Sequence
  Description of Artificial Sequence: Synthetic peptide
  N-term Ac
  MOD_RES (7)..(7): Alpha-Me R8-octenyl-alanine olefin amino acid connected by an all-carbon crosslinker comprising one double bond
  misc_feature (7)..(14): Crosslink between residues
  MOD_RES (14)..(14): Alpha-Me S5-pentenyl-alanine olefin amino acid connected by an all-carbon crosslinker comprising one double bond
  C-term NH2
AAALTFAEYWAQLAAAA

SEQ ID NO: 650 - protein, 18 aa, Artificial Sequence
  Description of Artificial Sequence: Synthetic peptide
  N-term Ac
  MOD_RES (8)..(8): Alpha-Me R8-octenyl-alanine olefin amino acid connected by an all-carbon crosslinker comprising one double bond
  misc_feature (8)..(15): Crosslink between residues
  MOD_RES (15)..(15): Alpha-Me S5-pentenyl-alanine olefin amino acid connected by an all-carbon crosslinker comprising one double bond
  C-term NH2
AAAALTFAEYWAQLAAAA

SEQ ID NO: 651 - protein, 19 aa, Artificial Sequence
  Description of Artificial Sequence: Synthetic peptide
  N-term Ac
  MOD_RES (9)..(9): Alpha-Me R8-octenyl-alanine olefin amino acid connected by an all-carbon crosslinker comprising one double bond
  misc_feature (9)..(16): Crosslink between residues
  MOD_RES (16)..(16): Alpha-Me S5-pentenyl-alanine olefin amino acid connected by an all-carbon crosslinker comprising one double bond
  C-term NH2
AAAAALTFAEYWAQLAAAA

SEQ ID NO: 652 - protein, 20 aa, Artificial Sequence
  Description of Artificial Sequence: Synthetic peptide
  N-term Ac
  MOD_RES (10)..(10): Alpha-Me R8-octenyl-alanine olefin amino acid connected by an all-carbon crosslinker comprising one double bond
  misc_feature (10)..(17): Crosslink between residues
  MOD_RES (17)..(17): Alpha-Me S5-pentenyl-alanine olefin amino acid connected by an all-carbon crosslinker comprising one double bond
  C-term NH2
AAAAAALTFAEYWAQLAAAA

SEQ ID NO: 653 - protein, 14 aa, Artificial Sequence
  Description of Artificial Sequence: Synthetic peptide
  N-term Ac
  MOD_RES (4)..(4): Alpha-Me R6-hexynyl-alanine alkynyl amino acids, crosslink via a dialkyne bond with a second alkynyl amino acid
  misc_feature (4)..(11): Crosslink between residues
  MOD_RES (10)..(10): Cyclobutyl-Ala
  MOD_RES (11)..(11): Alpha-Me S6-hexynyl-alanine alkynyl amino acid wherein the alkyne forms one half of a dialkyne bond with a second alkynyl amino acid
  C-term NH2
LTFAEYWAQAASAA

SEQ ID NO: 654 - protein, 12 aa, Artificial Sequence
  Description of Artificial Sequence: Synthetic peptide
  N-term Ac
  MOD_RES (1)..(1): D-amino acid
  MOD_RES (2)..(2): Alpha-Me R5-pentenyl-alanine olefin amino acid connected by an all-carbon crosslinker comprising one double bond
  misc_feature (2)..(6): Crosslink between residues
  MOD_RES (3)..(5): D-amino acid
  MOD_RES (6)..(6): Alpha-Me R5-pentenyl-alanine olefin amino acid connected by an all-carbon crosslinker comprising one double bond
  MOD_RES (7)..(7): D-Phe-4CF3
  MOD_RES (8)..(12): D-amino acid
  C-term NH2
TAWYAAFEKLLR

SEQ ID NO: 655 - protein, 12 aa, Artificial Sequence
  Description of Artificial Sequence: Synthetic peptide
  N-term Ac
  MOD_RES (1)..(4): D-amino acid
  MOD_RES (5)..(5): Alpha-Me R5-pentenyl-alanine olefin amino acid connected by an all-carbon crosslinker comprising one double bond
  misc_feature (5)..(9): Crosslink between residues
  MOD_RES (6)..(6): D-amino acid
  MOD_RES (7)..(7): D-Phe-4CF3
  MOD_RES (8)..(8): D-amino acid
  MOD_RES (9)..(9): Alpha-Me R5-pentenyl-alanine olefin amino acid connected by an all-carbon crosslinker comprising one double bond
  MOD_RES (10)..(12): D-amino acid
  C-term NH2
TAWYANFEALLR

SEQ ID NO: 656 - protein, 12 aa, Artificial Sequence
  Description of Artificial Sequence: Synthetic peptide
  N-term Ac
  MOD_RES (1)..(5): D-amino acid
  MOD_RES (6)..(6): Alpha-Me R5-pentenyl-alanine olefin amino acid connected by an all-carbon crosslinker comprising one double bond
  misc_feature (6)..(10): Crosslink between residues
  MOD_RES (7)..(7): D-Phe-4CF3
  MOD_RES (8)..(9): D-amino acid
  MOD_RES (10)..(10): Alpha-Me R5-pentenyl-alanine olefin amino acid connected by an all-carbon crosslinker comprising one double bond
  MOD_RES (11)..(12): D-amino acid
  C-term NH2
TAWYAAFEKALR

SEQ ID NO: 657 - protein, 14 aa, Artificial Sequence
  Description of Artificial Sequence: Synthetic peptide
  N-term Ac
  MOD_RES (1)..(6): D-amino acid
  MOD_RES (7)..(7): D-Phe-4CF3
  MOD_RES (8)..(8): D-amino acid
  MOD_RES (9)..(9): Alpha-Me R5-pentenyl-alanine olefin amino acid connected by an all-carbon crosslinker comprising one double bond
  misc_feature (9)..(13): Crosslink between residues
  MOD_RES (10)..(12): D-amino acid
  MOD_RES (13)..(13): Alpha-Me R5-pentenyl-alanine olefin amino acid connected by an all-carbon crosslinker comprising one double bond
  MOD_RES (14)..(14): D-amino acid
  C-term NH2
TAWYANFEALLRAA

SEQ ID NO: 658 - protein, 12 aa, Artificial Sequence
  Description of Artificial Sequence: Synthetic peptide
  N-term Ac
  MOD_RES (1)..(1): D-amino acid
  MOD_RES (2)..(2): Alpha-Me S8-octenyl-alanine olefin amino acid connected by an all-carbon crosslinker comprising one double bond
  misc_feature (2)..(9): Crosslink between residues
  MOD_RES (3)..(6): D-amino acid
  MOD_RES (7)..(7): D-Phe-4CF3
  MOD_RES (8)..(8): D-amino acid
  MOD_RES (9)..(9): Alpha-Me R5-pentenyl-alanine olefin amino acid connected by an all-carbon crosslinker comprising one double bond
  MOD_RES (10)..(12): D-amino acid
  C-term NH2
TAWYANFEALLR

SEQ ID NO: 659 - protein, 13 aa, Artificial Sequence
  Description of Artificial Sequence: Synthetic peptide
  N-term Ac
  MOD_RES (1)..(4): D-amino acid
  MOD_RES (5)..(5): Alpha-Me S8-octenyl-alanine olefin amino acid connected by an all-carbon crosslinker comprising one double bond
  misc_feature (5)..(12): Crosslink between residues
  MOD_RES (6)..(6): D-amino acid
  MOD_RES (7)..(7): D-Phe-4CF3
  MOD_RES (8)..(11): D-amino acid
  MOD_RES (12)..(12): Alpha-Me R5-pentenyl-alanine olefin amino acid connected by an all-carbon crosslinker comprising one double bond
  MOD_RES (13)..(13): D-amino acid
  C-term NH2
TAWYANFEKLLAA

SEQ ID NO: 660 - protein, 14 aa, Artificial Sequence
  Description of Artificial Sequence: Synthetic peptide
  N-term Ac
  MOD_RES (1)..(5): D-amino acid
  MOD_RES (6)..(6): Alpha-Me S8-octenyl-alanine olefin amino acid connected by an all-carbon crosslinker comprising one double bond
  misc_feature (6)..(13): Crosslink between residues
  MOD_RES (7)..(7): D-Phe-4CF3
  MOD_RES (8)..(12): D-amino acid
  MOD_RES (13)..(13): Alpha-Me R5-pentenyl-alanine olefin amino acid connected by an all-carbon crosslinker comprising one double bond
  MOD_RES (14)..(14): D-amino acid
  C-term NH2
TAWYAAFEKLLRAA

SEQ ID NO: 661 - protein, 13 aa, Artificial Sequence
  Description of Artificial Sequence: Synthetic peptide
  N-term Ac
  MOD_RES (1)..(4): D-amino acid
  MOD_RES (5)..(5): Alpha-Me S8-octenyl-alanine olefin amino acid connected by an all-carbon crosslinker comprising one double bond
  misc_feature (5)..(12): Crosslink between residues
  MOD_RES (6)..(11): D-amino acid
  MOD_RES (12)..(12): Alpha-Me R5-pentenyl-alanine olefin amino acid connected by an all-carbon crosslinker comprising one double bond
  MOD_RES (13)..(13): D-amino acid
  C-term NH2
TAWYANAEKLLAA

SEQ ID NO: 662 - protein, 14 aa, Artificial Sequence
  Description of Artificial Sequence: Synthetic peptide
  N-term 5-FAM
  MOD_RES (1)..(1): Beta-Ala
  MOD_RES (2)..(5): D-amino acid
  MOD_RES (6)..(6): Alpha-Me S8-octenyl-alanine olefin amino acid connected by an all-carbon crosslinker comprising one double bond
  misc_feature (6)..(13): Crosslink between residues
  MOD_RES (7)..(7): D-amino acid
  MOD_RES (8)..(8): D-Phe-4CF3
  MOD_RES (9)..(12): D-amino acid
  MOD_RES (13)..(13): Alpha-Me R5-pentenyl-alanine olefin amino acid connected by an all-carbon crosslinker comprising one double bond
  MOD_RES (14)..(14): D-amino acid
  C-term NH2
ATAWYANFEKLLAA

SEQ ID NO: 663 - protein, 14 aa, Artificial Sequence
  Description of Artificial Sequence: Synthetic peptide
  N-term 5-FAM
  MOD_RES (1)..(1): Beta-Ala
  MOD_RES (2)..(5): D-amino acid
  MOD_RES (6)..(6): Alpha-Me S8-octenyl-alanine olefin amino acid connected by an all-carbon crosslinker comprising one double bond
  misc_feature (6)..(13): Crosslink between residues
  MOD_RES (7)..(12): D-amino acid
  MOD_RES (13)..(13): Alpha-Me R5-pentenyl-alanine olefin amino acid connected by an all-carbon crosslinker comprising one double bond
  MOD_RES (14)..(14): D-amino acid
  C-term NH2
ATAWYANAEKLLAA

SEQ ID NO: 664 - protein, 13 aa, Artificial Sequence
  Description of Artificial Sequence: Synthetic peptide
  N-term Ac
  MOD_RES (1)..(4): D-amino acid
  MOD_RES (5)..(5): Alpha-Me S8-octenyl-alanine olefin amino acid connected by an all-carbon crosslinker comprising one double bond
  misc_feature (5)..(12): Crosslink between residues
  MOD_RES (6)..(6): D-amino acid
  MOD_RES (7)..(7): D-Phe-4CF3
  MOD_RES (8)..(11): D-amino acid
  MOD_RES (12)..(12): Alpha-Me R5-pentenyl-alanine olefin amino acid connected by an all-carbon crosslinker comprising one double bond
  MOD_RES (13)..(13): D-amino acid
  C-term NH2
TAWYANFEALLAA

SEQ ID NO: 665 - protein, 17 aa, Artificial Sequence
  Description of Artificial Sequence: Synthetic peptide
  N-term Ac
  MOD_RES (1)..(4): D-amino acid
  MOD_RES (5)..(5): Alpha-Me S8-octenyl-alanine olefin amino acid connected by an all-carbon crosslinker comprising one double bond
  misc_feature (5)..(12): Crosslink between residues
  MOD_RES (6)..(6): D-amino acid
  MOD_RES (7)..(7): D-Phe-4CF3
  MOD_RES (8)..(11): D-amino acid
  MOD_RES (12)..(12): Alpha-Me R5-pentenyl-alanine olefin amino acid connected by an all-carbon crosslinker comprising one double bond
  MOD_RES (13)..(17): D-amino acid
  C-term NH2
TAWYANFEKLLAAAAAA

SEQ ID NO: 666 - protein, 17 aa, Artificial Sequence
  Description of Artificial Sequence: Synthetic peptide
  N-term Ac
  MOD_RES (1)..(4): D-amino acid
  MOD_RES (5)..(5): Alpha-Me S8-octenyl-alanine olefin amino acid connected by an all-carbon crosslinker comprising one double bond
  misc_feature (5)..(12): Crosslink between residues
  MOD_RES (6)..(6): D-amino acid
  MOD_RES (7)..(7): D-Phe-4CF3
  MOD_RES (8)..(11): D-amino acid
  MOD_RES (12)..(12): Alpha-Me R5-pentenyl-alanine olefin amino acid connected by an all-carbon crosslinker comprising one double bond
  MOD_RES (13)..(17): D-amino acid
  C-term NH2
TAWYANFEALLAAAAAA

SEQ ID NO: 667 - protein, 15 aa, Artificial Sequence
  Description of Artificial Sequence: Synthetic peptide
  N-term Ac
  MOD_RES (4)..(4): Alpha-Me R8-octenyl-alanine olefin amino acid connected by an all-carbon crosslinker comprising one double bond
  misc_feature (4)..(11): Crosslink between residues
  MOD_RES (6)..(6): 4-carboxy Phe
  MOD_RES (10)..(10): Cyclobutyl-Ala
  MOD_RES (11)..(11): Alpha-Me S5-pentenyl-alanine olefin amino acid connected by an all-carbon crosslinker comprising one double bond
  MOD_RES (14)..(14): Norleucine
  C-term NH2
LTFAEFWAQAASALA

SEQ ID NO: 668 - protein, 17 aa, Artificial Sequence
  Description of Artificial Sequence: Synthetic peptide
  N-term Ac
  MOD_RES (4)..(4): Alpha-Me R8-octenyl-alanine olefin amino acid connected by an all-carbon crosslinker comprising one double bond
  misc_feature (4)..(11): Crosslink between residues
  MOD_RES (11)..(11): Alpha-Me S5-pentenyl-alanine olefin amino acid connected by an all-carbon crosslinker comprising one double bond
  MOD_RES (17)..(17): D-amino acid
  C-term NH2
LTFAEYWAQLAAAAAAA

SEQ ID NO: 669 - protein, 17 aa, Artificial Sequence
  Description of Artificial Sequence: Synthetic peptide
  N-term Ac
  MOD_RES (4)..(4): Alpha-Me R8-octenyl-alanine olefin amino acid connected by an all-carbon crosslinker comprising one double bond
  misc_feature (4)..(11): Crosslink between residues
  MOD_RES (7)..(7): 6cl-Trp
  MOD_RES (11)..(11): Alpha-Me S5-pentenyl-alanine olefin amino acid connected by an all-carbon crosslinker comprising one double bond
  MOD_RES (17)..(17): D-amino acid
  C-term NH2
LTFAEYWAQLAAAAAAA

SEQ ID NO: 670 - protein, 20 aa, Artificial Sequence
  Description of Artificial Sequence: Synthetic peptide
  N-term Ac
  MOD_RES (7)..(7): Alpha-Me R8-octenyl-alanine olefin amino acid connected by an all-carbon crosslinker comprising one double bond
  misc_feature (7)..(14): Crosslink between residues
  MOD_RES (14)..(14): Alpha-Me S5-pentenyl-alanine olefin amino acid connected by an all-carbon crosslinker comprising one double bond
  MOD_RES (20)..(20): D-amino acid
  C-term NH2
AAALTFAEYWAQLAAAAAAA

SEQ ID NO: 671 - protein, 17 aa, Artificial Sequence
  Description of Artificial Sequence: Synthetic peptide
  N-term Ac
  MOD_RES (3)..(3): 3,4-difluoro Phe
  MOD_RES (4)..(4): Alpha-Me R8-octenyl-alanine olefin amino acid connected by an all-carbon crosslinker comprising one double bond
  misc_feature (4)..(11): Crosslink between residues
  MOD_RES (11)..(11): Alpha-Me S5-pentenyl-alanine olefin amino acid connected by an all-carbon crosslinker comprising one double bond
  MOD_RES (17)..(17): D-amino acid
  C-term NH2
LTFAEYWAQLAAAAAAA

SEQ ID NO: 672 - protein, 17 aa, Artificial Sequence
  Description of Artificial Sequence: Synthetic peptide
  N-term Ac
  MOD_RES (4)..(4): Alpha-Me R8-octenyl-alanine olefin amino acid connected by an all-carbon crosslinker comprising one double bond
  misc_feature (4)..(11): Crosslink between residues
  MOD_RES (11)..(11): Alpha-Me S5-pentenyl-alanine olefin amino acid connected by an all-carbon crosslinker comprising one double bond
  MOD_RES (13)..(13): 2-aminoisobutyric acid
  MOD_RES (17)..(17): D-amino acid
  C-term NH2
LTFAEYWAQLAAXAAAA

SEQ ID NO: 673 - protein, 17 aa, Artificial Sequence
  Description of Artificial Sequence: Synthetic peptide
  N-term Ac
  MOD_RES (4)..(4): Alpha-Me R8-octenyl-alanine olefin amino acid connected by an all-carbon crosslinker comprising one double bond
  misc_feature (4)..(11): Crosslink between residues
  MOD_RES (11)..(11): Alpha-Me S5-pentenyl-alanine olefin amino acid connected by an all-carbon crosslinker comprising one double bond
  MOD_RES (15)..(15): 2-aminoisobutyric acid
  MOD_RES (17)..(17): D-amino acid
  C-term NH2
LTFAEYWAQLAAAAXAA

SEQ ID NO: 674 - protein, 17 aa, Artificial Sequence
  Description of Artificial Sequence: Synthetic peptide
  N-term Ac
  MOD_RES (4)..(4): Alpha-Me R8-octenyl-alanine olefin amino acid connected by an all-carbon crosslinker comprising one double bond
  misc_feature (4)..(11): Crosslink between residues
  MOD_RES (11)..(11): Alpha-Me S5-pentenyl-alanine olefin amino acid connected by an all-carbon crosslinker comprising one double bond
  MOD_RES (16)..(16): 2-aminoisobutyric acid
  MOD_RES (17)..(17): D-amino acid
  C-term NH2
LTFAEYWAQLAAAAAXA

SEQ ID NO: 675 - protein, 17 aa, Artificial Sequence
  Description of Artificial Sequence: Synthetic peptide
  N-term Ac
  MOD_RES (4)..(4): Alpha-Me R8-octenyl-alanine olefin amino acid connected by an all-carbon crosslinker comprising one double bond
  misc_feature (4)..(11): Crosslink between residues
  MOD_RES (11)..(11): Alpha-Me S5-pentenyl-alanine olefin amino acid connected by an all-carbon crosslinker comprising one double bond
  MOD_RES (17)..(17): 2-aminoisobutyric acid
  C-term NH2
LTFAEYWAQLAAAAAAX

SEQ ID NO: 676 - protein, 17 aa, Artificial Sequence
  Description of Artificial Sequence: Synthetic peptide
  N-term Ac
  MOD_RES (4)..(4): Alpha-Me R8-octenyl-alanine olefin amino acid connected by an all-carbon crosslinker comprising one double bond
  misc_feature (4)..(11): Crosslink between residues
  MOD_RES (11)..(11): Alpha-Me S5-pentenyl-alanine olefin amino acid connected by an all-carbon crosslinker comprising one double bond
  MOD_RES (16)..(17): D-amino acid
  C-term NH2
LTFAEYWAQLAAAAAAA

SEQ ID NO: 677 - protein, 17 aa, Artificial Sequence
  Description of Artificial Sequence: Synthetic peptide
  N-term Ac
  MOD_RES (4)..(4): Alpha-Me R8-octenyl-alanine olefin amino acid connected by an all-carbon crosslinker comprising one double bond
  misc_feature (4)..(11): Crosslink between residues
  MOD_RES (11)..(11): Alpha-Me S5-pentenyl-alanine olefin amino acid connected by an all-carbon crosslinker comprising one double bond
  C-term NH2
LTFAEYWAQLAAAAAAA

SEQ ID NO: 678 - protein, 17 aa, Artificial Sequence
  Description of Artificial Sequence: Synthetic peptide
  N-term Ac
  MOD_RES (4)..(4): Alpha-Me R8-octenyl-alanine olefin amino acid connected by an all-carbon crosslinker comprising one double bond
  misc_feature (4)..(11): Crosslink between residues
  MOD_RES (11)..(11): Alpha-Me S5-pentenyl-alanine olefin amino acid connected by an all-carbon crosslinker comprising one double bond
  MOD_RES (17)..(17): Sarcosine
  C-term NH2
LTFAEYWAQLAAAAAAX

SEQ ID NO: 679 - protein, 17 aa, Artificial Sequence
  Description of Artificial Sequence: Synthetic peptide
  N-term Ac
  MOD_RES (4)..(4): Alpha-Me R8-octenyl-alanine olefin amino acid connected by an all-carbon crosslinker comprising one double bond
  misc_feature (4)..(11): Crosslink between residues
  MOD_RES (11)..(11): Alpha-Me S5-pentenyl-alanine olefin amino acid connected by an all-carbon crosslinker comprising one double bond
  MOD_RES (17)..(17): D-amino acid
  C-term OH
LTFAEYWAQLAAAAAAA

SEQ ID NO: 680 - protein, 17 aa, Artificial Sequence
  Description of Artificial Sequence: Synthetic peptide
  N-term Ac
  MOD_RES (4)..(4): Alpha-Me R6-hexynyl-alanine alkynyl amino acids, crosslink via a dialkyne bond with a second alkynyl amino acid
  misc_feature (4)..(11): Crosslink between residues
  MOD_RES (11)..(11): Alpha-Me S5-pentynyl-alanine alkynyl amino acids, wherein the alkyne forms one half of a dialkyne bond with a second alkynyl amino acid
  MOD_RES (17)..(17): D-amino acid
  C-term NH2
LTFAAYWAQLAAAAAAA

SEQ ID NO: 681 - protein, 15 aa, Artificial Sequence
  Description of Artificial Sequence: Synthetic peptide
  N-term 5-FAM
  MOD_RES (1)..(1): Beta-Ala
  MOD_RES (5)..(5): Alpha-Me R8-octenyl-alanine olefin amino acid connected by an all-carbon crosslinker comprising one double bond
  misc_feature (5)..(12): Crosslink between residues
  MOD_RES (11)..(11): Cyclobutyl-Ala
  MOD_RES (12)..(12): Alpha-Me S5-pentenyl-alanine olefin amino acid connected by an all-carbon crosslinker comprising one double bond
  C-term NH2
ALTFAEYWAQAASAA

SEQ ID NO: 682 - protein, 17 aa, Artificial Sequence
  Description of Artificial Sequence: Synthetic peptide
  N-term Ac
  MOD_RES (4)..(4): Alpha-Me R8-octenyl-alanine olefin amino acid connected by an all-carbon crosslinker comprising one double bond
  misc_feature (4)..(11): Crosslink between residues
  MOD_RES (6)..(6): 4-carboxy Phe
  MOD_RES (10)..(10): Cyclobutyl-Ala
  MOD_RES (11)..(11): Alpha-Me S5-pentenyl-alanine olefin amino acid connected by an all-carbon crosslinker comprising one double bond
  MOD_RES (17)..(17): D-amino acid
  C-term NH2
LTFAEFWAQAAAAAAAA

SEQ ID NO: 683 - protein, 17 aa, Artificial Sequence
  Description of Artificial Sequence: Synthetic peptide
  N-term Ac
  MOD_RES (4)..(4): Alpha-Me R8-octenyl-alanine olefin amino acid connected by an all-carbon crosslinker comprising one double bond
  misc_feature (4)..(11): Crosslink between residues
  MOD_RES (10)..(10): Cyclobutyl-Ala
  MOD_RES (11)..(11): Alpha-Me S5-pentenyl-alanine olefin amino acid connected by an all-carbon crosslinker comprising one double bond
  MOD_RES (17)..(17): D-amino acid
  C-term NH2
LTFAEYWAQAAAAAAAA

SEQ ID NO: 684 - protein, 16 aa, Artificial Sequence
  Description of Artificial Sequence: Synthetic peptide
  N-term Ac
  MOD_RES (3)..(3): Alpha-Me R8-octenyl-alanine olefin amino acid connected by an all-carbon crosslinker comprising one double bond
  misc_feature (3)..(10): Crosslink between residues
  MOD_RES (10)..(10): Alpha-Me S5-pentenyl-alanine olefin amino acid connected by an all-carbon crosslinker comprising one double bond
  MOD_RES (16)..(16): D-amino acid
  C-term NH2
TFAEYWAQLAAAAAAA

SEQ ID NO: 685 - protein, 15 aa, Artificial Sequence
  Description of Artificial Sequence: Synthetic peptide
  N-term Ac
  MOD_RES (2)..(2): Alpha-Me R8-octenyl-alanine olefin amino acid connected by an all-carbon crosslinker comprising one double bond
  misc_feature (2)..(9): Crosslink between residues
  MOD_RES (9)..(9): Alpha-Me S5-pentenyl-alanine olefin amino acid connected by an all-carbon crosslinker comprising one double bond
  MOD_RES (15)..(15): D-amino acid
  C-term NH2
FAEYWAQLAAAAAAA

SEQ ID NO: 686 - protein, 17 aa, Artificial Sequence
  Description of Artificial Sequence: Synthetic peptide
  N-term Ac
  MOD_RES (4)..(4): Alpha-Me R8-octenyl-alanine olefin amino acid connected by an all-carbon crosslinker comprising one double bond
  misc_feature (4)..(11): Crosslink between residues
  MOD_RES (11)..(11): Alpha-Me S5-pentenyl-alanine olefin amino acid connected by an all-carbon crosslinker comprising one double bond
  MOD_RES (17)..(17): D-amino acid
  C-term NH2
LVFAEYWAQLAAAAAAA

SEQ ID NO: 687 - protein, 17 aa, Artificial Sequence
  Description of Artificial Sequence: Synthetic peptide
  N-term Ac
  MOD_RES (4)..(4): Alpha-Me R8-octenyl-alanine olefin amino acid connected by an all-carbon crosslinker comprising one double bond
  misc_feature (4)..(11): Crosslink between residues
  MOD_RES (11)..(11): Alpha-Me S5-pentenyl-alanine olefin amino acid connected by an all-carbon crosslinker comprising one double bond
  MOD_RES (17)..(17): D-amino acid
  C-term NH2
AAFAEYWAQLAAAAAAA

SEQ ID NO: 688 - protein, 16 aa, Artificial Sequence
  Description of Artificial Sequence: Synthetic peptide
  N-term Ac
  MOD_RES (4)..(4): Alpha-Me R8-octenyl-alanine olefin amino acid connected by an all-carbon crosslinker comprising one double bond
  misc_feature (4)..(11): Crosslink between residues
  MOD_RES (11)..(11): Alpha-Me S5-pentenyl-alanine olefin amino acid connected by an all-carbon crosslinker comprising one double bond
  MOD_RES (16)..(16): D-amino acid
  C-term NH2
LTFAEYWAQLAAAAAA

SEQ ID NO: 689 - protein, 15 aa, Artificial Sequence
  Description of Artificial Sequence: Synthetic peptide
  N-term Ac
  MOD_RES (4)..(4): Alpha-Me R8-octenyl-alanine olefin amino acid connected by an all-carbon crosslinker comprising one double bond
  misc_feature (4)..(11): Crosslink between residues
  MOD_RES (11)..(11): Alpha-Me S5-pentenyl-alanine olefin amino acid connected by an all-carbon crosslinker comprising one double bond
  MOD_RES (15)..(15): D-amino acid
  C-term NH2
LTFAEYWAQLAAAAA

SEQ ID NO: 690 - protein, 14 aa, Artificial Sequence
  Description of Artificial Sequence: Synthetic peptide
  N-term Ac
  MOD_RES (4)..(4): Alpha-Me R8-octenyl-alanine olefin amino acid connected by an all-carbon crosslinker comprising one double bond
  misc_feature (4)..(11): Crosslink between residues
  MOD_RES (11)..(11): Alpha-Me S5-pentenyl-alanine olefin amino acid connected by an all-carbon crosslinker comprising one double bond
  MOD_RES (14)..(14): D-amino acid
  C-term NH2
LTFAEYWAQLAAAA

SEQ ID NO: 691 - protein, 13 aa, Artificial Sequence
  Description of Artificial Sequence: Synthetic peptide
  N-term Ac
  MOD_RES (4)..(4): Alpha-Me R8-octenyl-alanine olefin amino acid connected by an all-carbon crosslinker comprising one double bond
  misc_feature (4)..(11): Crosslink between residues
  MOD_RES (11)..(11): Alpha-Me S5-pentenyl-alanine olefin amino acid connected by an all-carbon crosslinker comprising one double bond
  MOD_RES (13)..(13): D-amino acid
  C-term NH2
LTFAEYWAQLAAA

SEQ ID NO: 692 - protein, 12 aa, Artificial Sequence
  Description of Artificial Sequence: Synthetic peptide
  N-term Ac
  MOD_RES (4)..(4): Alpha-Me R8-octenyl-alanine olefin amino acid connected by an all-carbon crosslinker comprising one double bond
  misc_feature (4)..(11): Crosslink between residues
  MOD_RES (11)..(11): Alpha-Me S5-pentenyl-alanine olefin amino acid connected by an all-carbon crosslinker comprising one double bond
  MOD_RES (12)..(12): D-amino acid
  C-term NH2
LTFAEYWAQLAA

SEQ ID NO: 693 - protein, 16 aa, Artificial Sequence
  Description of Artificial Sequence: Synthetic peptide
  MOD_RES (2)..(2): Alpha-Me R5-pentenyl-alanine olefin amino acid connected by an all-carbon crosslinker comprising one double bond
  misc_feature (2)..(9): Crosslink between residues
  MOD_RES (9)..(9): Alpha-Me S8-octenyl-alanine olefin amino acid connected by an all-carbon crosslinker comprising one double bond
LAQETFSDAWKLLPEN

SEQ ID NO: 694 - protein, 16 aa, Artificial Sequence
  Description of Artificial Sequence: Synthetic peptide
  MOD_RES (4)..(4): Alpha-Me R5-pentenyl-alanine olefin amino acid connected by an all-carbon crosslinker comprising one double bond
  misc_feature (4)..(11): Crosslink between residues
  MOD_RES (11)..(11): Alpha-Me S8-octenyl-alanine olefin amino acid connected by an all-carbon crosslinker comprising one double bond
LSQATFSDLWALLPEN

SEQ ID NO: 695 - protein, 16 aa, Artificial Sequence
  Description of Artificial Sequence: Synthetic peptide
  MOD_RES (5)..(5): Alpha-Me R5-pentenyl-alanine olefin amino acid connected by an all-carbon crosslinker comprising one double bond
  misc_feature (5)..(12): Crosslink between residues
  MOD_RES (12)..(12): Alpha-Me S8-octenyl-alanine olefin amino acid connected by an all-carbon crosslinker comprising one double bond
LSQEAFSDLWKALPEN

SEQ ID NO: 696 - protein, 16 aa, Artificial Sequence
  Description of Artificial Sequence: Synthetic peptide
  MOD_RES (6)..(6): Alpha-Me R5-pentenyl-alanine olefin amino acid connected by an all-carbon crosslinker comprising one double bond
  misc_feature (6)..(13): Crosslink between residues
  MOD_RES (13)..(13): Alpha-Me S8-octenyl-alanine olefin amino acid connected by an all-carbon crosslinker comprising one double bond
LSQETASDLWKLAPEN

SEQ ID NO: 697 - protein, 16 aa, Artificial Sequence
  Description of Artificial Sequence: Synthetic peptide
  MOD_RES (7)..(7): Alpha-Me R5-pentenyl-alanine olefin amino acid connected by an all-carbon crosslinker comprising one double bond
  misc_feature (7)..(14): Crosslink between residues
  MOD_RES (14)..(14): Alpha-Me S8-octenyl-alanine olefin amino acid connected by an all-carbon crosslinker comprising one double bond
LSQETFADLWKLLAEN

SEQ ID NO: 698 - protein, 16 aa, Artificial Sequence
  Description of Artificial Sequence: Synthetic peptide
  MOD_RES (2)..(2): Any amino acid
  MOD_RES (8)..(8): Alpha-Me R5-pentenyl-alanine olefin amino acid connected by an all-carbon crosslinker comprising one double bond
  misc_feature (8)..(15): Crosslink between residues
  MOD_RES (15)..(15): Alpha-Me S8-octenyl-alanine olefin amino acid connected by an all-carbon crosslinker comprising one double bond
LXQETFSALWKLLPAN

SEQ ID NO: 699 - protein, 16 aa, Artificial Sequence
  Description of Artificial Sequence: Synthetic peptide
  MOD_RES (9)..(9): Alpha-Me R5-pentenyl-alanine olefin amino acid connected by an all-carbon crosslinker comprising one double bond
  misc_feature (9)..(16): Crosslink between residues
  MOD_RES (16)..(16): Alpha-Me S8-octenyl-alanine olefin amino acid connected by an all-carbon crosslinker comprising one double bond
LSQETFSDAWKLLPEA

SEQ ID NO: 700 - protein, 16 aa, Artificial Sequence
  Description of Artificial Sequence: Synthetic peptide
  MOD_RES (7)..(7): Alpha-Me R5-pentenyl-alanine olefin amino acid connected by an all-carbon crosslinker comprising one double bond
  misc_feature (7)..(14): Crosslink between residues
  MOD_RES (14)..(14): Alpha-Me S8-octenyl-alanine olefin amino acid connected by an all-carbon crosslinker comprising one double bond
LSQQTFADLWKLLAEN

SEQ ID NO: 701 - protein, 16 aa, Artificial Sequence
  Description of Artificial Sequence: Synthetic peptide
  MOD_RES (7)..(7): Alpha-Me R5-pentenyl-alanine olefin amino acid connected by an all-carbon crosslinker comprising one double bond
  misc_feature (7)..(14): Crosslink between residues
  MOD_RES (14)..(14): Alpha-Me S8-octenyl-alanine olefin amino acid connected by an all-carbon crosslinker comprising one double bond
LSQETFADLWKLLAQN

SEQ ID NO: 702 - protein, 16 aa, Artificial Sequence
  Description of Artificial Sequence: Synthetic peptide
  MOD_RES (7)..(7): Alpha-Me R5-pentenyl-alanine olefin amino acid connected by an all-carbon crosslinker comprising one double bond
  misc_feature (7)..(14): Crosslink between residues
  MOD_RES (14)..(14): Alpha-Me S8-octenyl-alanine olefin amino acid connected by an all-carbon crosslinker comprising one double bond
LSQQTFADLWKLLAQN

SEQ ID NO: 703 - protein, 16 aa, Artificial Sequence
  Description of Artificial Sequence: Synthetic peptide
  MOD_RES (7)..(7): Alpha-Me R5-pentenyl-alanine olefin amino acid connected by an all-carbon crosslinker comprising one double bond
  misc_feature (7)..(14): Crosslink between residues
  MOD_RES (14)..(14): Alpha-Me S8-octenyl-alanine olefin amino acid connected by an all-carbon crosslinker comprising one double bond
LSQETFANLWKLLAQN

SEQ ID NO: 704 - protein, 16 aa, Artificial Sequence
  Description of Artificial Sequence: Synthetic peptide
  MOD_RES (7)..(7): Alpha-Me R5-pentenyl-alanine olefin amino acid connected by an all-carbon crosslinker comprising one double bond
  misc_feature (7)..(14): Crosslink between residues
  MOD_RES (14)..(14): Alpha-Me S8-octenyl-alanine olefin amino acid connected by an all-carbon crosslinker comprising one double bond
LSQQTFANLWKLLAQN

SEQ ID NO: 705 - protein, 16 aa, Artificial Sequence
  Description of Artificial Sequence: Synthetic peptide
  MOD_RES (7)..(7): Alpha-Me R5-pentenyl-alanine olefin amino acid connected by an all-carbon crosslinker comprising one double bond
  misc_feature (7)..(14): Crosslink between residues
  MOD_RES (14)..(14): Alpha-Me S8-octenyl-alanine olefin amino acid connected by an all-carbon crosslinker comprising one double bond
LSQQTFANLWRLLAQN

SEQ ID NO: 706 - protein, 16 aa, Artificial Sequence
  Description of Artificial Sequence: Synthetic peptide
  MOD_RES (7)..(7): Alpha-Me R5-pentenyl-alanine olefin amino acid connected by an all-carbon crosslinker comprising one double bond
  misc_feature (7)..(14): Crosslink between residues
  MOD_RES (14)..(14): Alpha-Me S8-octenyl-alanine olefin amino acid connected by an all-carbon crosslinker comprising one double bond
QSQQTFANLWKLLAQN

SEQ ID NO: 707 - protein, 16 aa, Artificial Sequence
  Description of Artificial Sequence: Synthetic peptide
  MOD_RES (7)..(7): Alpha-Me R5-pentenyl-alanine olefin amino acid connected by an all-carbon crosslinker comprising one double bond
  misc_feature (7)..(14): Crosslink between residues
  MOD_RES (14)..(14): Alpha-Me S8-octenyl-alanine olefin amino acid connected by an all-carbon crosslinker comprising one double bond
QSQQTFANLWRLLAQN

SEQ ID NO: 708 - protein, 16 aa, Artificial Sequence
  Description of Artificial Sequence: Synthetic peptide
  MOD_RES (7)..(7): Alpha-Me R5-pentenyl-alanine olefin amino acid connected by an all-carbon crosslinker comprising one double bond
  misc_feature (7)..(14): Crosslink between residues
  MOD_RES (14)..(14): Alpha-Me S8-octenyl-alanine olefin amino acid connected by an all-carbon crosslinker comprising one double bond
QSQQTAANLWRLLAQN

SEQ ID NO: 709 - protein, 16 aa, Artificial Sequence
  Description of Artificial Sequence: Synthetic peptide
  MOD_RES (2)..(2): Alpha-Me R8-octenyl-alanine olefin amino acid connected by an all-carbon crosslinker comprising one double bond
  misc_feature (2)..(9): Crosslink between residues
  MOD_RES (9)..(9): Alpha-Me S5-pentenyl-alanine olefin amino acid connected by an all-carbon crosslinker comprising one double bond
LAQETFSDAWKLLPEN

SEQ ID NO: 710 - protein, 16 aa, Artificial Sequence
  Description of Artificial Sequence: Synthetic peptide
  MOD_RES (4)..(4): Alpha-Me R8-octenyl-alanine olefin amino acid connected by an all-carbon crosslinker comprising one double bond
  misc_feature (4)..(11): Crosslink between residues
  MOD_RES (11)..(11): Alpha-Me S5-pentenyl-alanine olefin amino acid connected by an all-carbon crosslinker comprising one double bond
LSQATFSDLWALLPEN

SEQ ID NO: 711 - protein, 16 aa, Artificial Sequence
  Description of Artificial Sequence: Synthetic peptide
  MOD_RES (5)..(5): Alpha-Me R8-octenyl-alanine olefin amino acid connected by an all-carbon crosslinker comprising one double bond
  misc_feature (5)..(12): Crosslink between residues
  MOD_RES (12)..(12): Alpha-Me S5-pentenyl-alanine olefin amino acid connected by an all-carbon crosslinker comprising one double bond
LSQEAFSDLWKALPEN

SEQ ID NO: 712 - protein, 16 aa, Artificial Sequence
  Description of Artificial Sequence: Synthetic peptide
  MOD_RES (6)..(6): Alpha-Me R8-octenyl-alanine olefin amino acid connected by an all-carbon crosslinker comprising one double bond
  misc_feature (6)..(13): Crosslink between residues
  MOD_RES (13)..(13): Alpha-Me S5-pentenyl-alanine olefin amino acid connected by an all-carbon crosslinker comprising one double bond
LSQETASDLWKLAPEN

SEQ ID NO: 713 - protein, 16 aa, Artificial Sequence
  Description of Artificial Sequence: Synthetic peptide
  MOD_RES (7)..(7): Alpha-Me R8-octenyl-alanine olefin amino acid connected by an all-carbon crosslinker comprising one double bond
  misc_feature (7)..(14): Crosslink between residues
  MOD_RES (14)..(14): Alpha-Me S5-pentenyl-alanine olefin amino acid connected by an all-carbon crosslinker comprising one double bond
LSQETFADLWKLLAEN

SEQ ID NO: 714 - protein, 16 aa, Artificial Sequence
  Description of Artificial Sequence: Synthetic peptide
  MOD_RES (2)..(2): Any amino acid
  MOD_RES (8)..(8): Alpha-Me R8-octenyl-alanine olefin amino acid connected by an all-carbon crosslinker comprising one double bond
  misc_feature (8)..(15): Crosslink between residues
  MOD_RES (15)..(15): Alpha-Me S5-pentenyl-alanine olefin amino acid connected by an all-carbon crosslinker comprising one double bond
LXQETFSALWKLLPAN

SEQ ID NO: 715 - protein, 16 aa, Artificial Sequence
  Description of Artificial Sequence: Synthetic peptide
  MOD_RES (9)..(9): Alpha-Me R8-octenyl-alanine olefin amino acid connected by an all-carbon crosslinker comprising one double bond
  misc_feature (9)..(16): Crosslink between residues
  MOD_RES (16)..(16): Alpha-Me S5-pentenyl-alanine olefin amino acid connected by an all-carbon crosslinker comprising one double bond
LSQETFSDAWKLLPEA

SEQ ID NO: 716 - protein, 16 aa, Artificial Sequence
  Description of Artificial Sequence: Synthetic peptide
  MOD_RES (7)..(7): Alpha-Me R8-octenyl-alanine olefin amino acid connected by an all-carbon crosslinker comprising one double bond
  misc_feature (7)..(14): Crosslink between residues
  MOD_RES (14)..(14): Alpha-Me S5-pentenyl-alanine olefin amino acid connected by an all-carbon crosslinker comprising one double bond
LSQQTFADLWKLLAEN

SEQ ID NO: 717 - protein, 16 aa, Artificial Sequence
  Description of Artificial Sequence: Synthetic peptide
  MOD_RES (7)..(7): Alpha-Me R8-octenyl-alanine olefin amino acid connected by an all-carbon crosslinker comprising one double bond
  misc_feature (7)..(14): Crosslink between residues
  MOD_RES (14)..(14): Alpha-Me S5-pentenyl-alanine olefin amino acid connected by an all-carbon crosslinker comprising one double bond
LSQETFADLWKLLAQN

SEQ ID NO: 718 - protein, 16 aa, Artificial Sequence
  Description of Artificial Sequence: Synthetic peptide
  MOD_RES (7)..(7): Alpha-Me R8-octenyl-alanine olefin amino acid connected by an all-carbon crosslinker comprising one double bond
  misc_feature (7)..(14): Crosslink between residues
  MOD_RES (14)..(14): Alpha-Me S5-pentenyl-alanine olefin amino acid connected by an all-carbon crosslinker comprising one double bond
LSQQTFADLWKLLAQN

SEQ ID NO: 719 - protein, 16 aa, Artificial Sequence
  Description of Artificial Sequence: Synthetic peptide
  MOD_RES (7)..(7): Alpha-Me R8-octenyl-alanine olefin amino acid connected by an all-carbon crosslinker comprising one double bond
  misc_feature (7)..(14): Crosslink between residues
  MOD_RES (14)..(14): Alpha-Me S5-pentenyl-alanine olefin amino acid connected by an all-carbon crosslinker comprising one double bond
LSQETFANLWKLLAQN

SEQ ID NO: 720 - protein, 16 aa, Artificial Sequence
  Description of Artificial Sequence: Synthetic peptide
  MOD_RES (7)..(7): Alpha-Me R8-octenyl-alanine olefin amino acid connected by an all-carbon crosslinker comprising one double bond
  misc_feature (7)..(14): Crosslink between residues
  MOD_RES (14)..(14): Alpha-Me S5-pentenyl-alanine olefin amino acid connected by an all-carbon crosslinker comprising one double bond
LSQQTFANLWKLLAQN

SEQ ID NO: 721 - protein, 16 aa, Artificial Sequence
  Description of Artificial Sequence: Synthetic peptide
  MOD_RES (7)..(7): Alpha-Me R8-octenyl-alanine olefin amino acid connected by an all-carbon crosslinker comprising one double bond
  misc_feature (7)..(14): Crosslink between residues
  MOD_RES (14)..(14): Alpha-Me S5-pentenyl-alanine olefin amino acid connected by an all-carbon crosslinker comprising one double bond
LSQQTFANLWRLLAQN

SEQ ID NO: 722 - protein, 16 aa, Artificial Sequence
  Description of Artificial Sequence: Synthetic peptide
  MOD_RES (7)..(7): Alpha-Me R8-octenyl-alanine olefin amino acid connected by an all-carbon crosslinker comprising one double bond
  misc_feature (7)..(14): Crosslink between residues
  MOD_RES (14)..(14): Alpha-Me S5-pentenyl-alanine olefin amino acid connected by an all-carbon crosslinker comprising one double bond
QSQQTFANLWKLLAQN

SEQ ID NO: 723 - protein, 16 aa, Artificial Sequence
  Description of Artificial Sequence: Synthetic peptide
  MOD_RES (7)..(7): Alpha-Me R8-octenyl-alanine olefin amino acid connected by an all-carbon crosslinker comprising one double bond
  misc_feature (7)..(14): Crosslink between residues
  MOD_RES (14)..(14): Alpha-Me S5-pentenyl-alanine olefin amino acid connected by an all-carbon crosslinker comprising one double bond
QSQQTFANLWRLLAQN

SEQ ID NO: 724 - protein, 16 aa, Artificial Sequence
  Description of Artificial Sequence: Synthetic peptide
  MOD_RES (7)..(7): Alpha-Me R8-octenyl-alanine olefin amino acid connected by an all-carbon crosslinker comprising one double bond
  misc_feature (7)..(14): Crosslink between residues
  MOD_RES (14)..(14): Alpha-Me S5-pentenyl-alanine olefin amino acid connected by an all-carbon crosslinker comprising one double bond
QSQQTAANLWRLLAQN

SEQ ID NO: 725 - protein, 16 aa, Artificial Sequence
  Description of Artificial Sequence: Synthetic peptide
  MOD_RES (7)..(7): Alpha-Me R8-octenyl-alanine olefin amino acid connected by an all-carbon crosslinker comprising one double bond
  misc_feature (7)..(14): Crosslink between residues
  MOD_RES (14)..(14): Alpha-Me S5-pentenyl-alanine olefin amino acid connected by an all-carbon crosslinker comprising one double bond
QSQQTFANLWRKKAQN

SEQ ID NO: 726 - protein, 14 aa, Artificial Sequence
  Description of Artificial Sequence: Synthetic peptide
  MOD_RES (5)..(5): Alpha-Me R8-octenyl-alanine olefin amino acid connected by an all-carbon crosslinker comprising one double bond
  misc_feature (5)..(12): Crosslink between residues
  MOD_RES (12)..(12): Alpha-Me S5-pentenyl-alanine olefin amino acid connected by an all-carbon crosslinker comprising one double bond
QQTFADLWRLLAEN

SEQ ID NO: 727 - protein, 12 aa, Artificial Sequence
  Description of Artificial Sequence: Synthetic peptide
  MOD_RES (5)..(5): Alpha-Me R8-octenyl-alanine olefin amino acid connected by an all-carbon crosslinker comprising one double bond
  misc_feature (5)..(12): Crosslink between residues
  MOD_RES (12)..(12): Alpha-Me S5-pentenyl-alanine olefin amino acid connected by an all-carbon crosslinker comprising one double bond
QQTFADLWRLLA

SEQ ID NO: 728 - protein, 13 aa, Artificial Sequence
  Description of Artificial Sequence: Synthetic peptide
  MOD_RES (7)..(7): Alpha-Me S5-pentenyl-alanine olefin amino acid connected by an all-carbon crosslinker comprising one double bond
  misc_feature (7)..(11): Crosslink between residues
  MOD_RES (11)..(11): Alpha-Me S5-pentenyl-alanine olefin amino acid connected by an all-carbon crosslinker comprising one double bond
LSQQTFADLWALL

SEQ ID NO: 729 - protein, 11 aa, Artificial Sequence
  Description of Artificial Sequence: Synthetic peptide
  MOD_RES (5)..(5): Alpha-Me S5-pentenyl-alanine olefin amino acid connected by an all-carbon crosslinker comprising one double bond
  misc_feature (5)..(9): Crosslink between residues
  MOD_RES (9)..(9): Alpha-Me S5-pentenyl-alanine olefin amino acid connected by an all-carbon crosslinker comprising one double bond
QQTFADLWALL

SEQ ID NO: 730 - protein, 14 aa, Artificial Sequence
  Description of Artificial Sequence: Synthetic peptide
  MOD_RES (5)..(5): Alpha-Me R8-octenyl-alanine olefin amino acid connected by an all-carbon crosslinker comprising one double bond
  misc_feature (5)..(12): Crosslink between residues
  MOD_RES (12)..(12): Alpha-Me S5-pentenyl-alanine olefin amino acid connected by an all-carbon crosslinker comprising one double bond
QQTAADLWRLLAEN

SEQ ID NO: 731 - protein, 16 aa, Artificial Sequence
  Description of Artificial Sequence: Synthetic peptide
  MOD_RES (7)..(7): Alpha-Me R5-pentenyl-alanine olefin amino acid connected by an all-carbon crosslinker comprising one double bond
  misc_feature (7)..(14): Crosslink between residues
  MOD_RES (14)..(14): Alpha-Me S8-octenyl-alanine olefin amino acid connected by an all-carbon crosslinker comprising one double bond
QSQQTFANLWRLLAQN

SEQ ID NO: 732 - protein, 16 aa, Artificial Sequence
  Description of Artificial Sequence: Synthetic peptide
  MOD_RES (7)..(7): Alpha-Me R5-pentenyl-alanine olefin amino acid connected by an all-carbon crosslinker comprising one double bond
  misc_feature (7)..(14): Crosslink between residues
  MOD_RES (14)..(14): Alpha-Me S8-octenyl-alanine olefin amino acid connected by an all-carbon crosslinker comprising one double bond
QSQQTAANLWRLLAQN

SEQ ID NO: 733 - protein, 16 aa, Artificial Sequence
  Description of Artificial Sequence: Synthetic peptide
  MOD_RES (7)..(7): Alpha-Me R8-octenyl-alanine olefin amino acid connected by an all-carbon crosslinker comprising one double bond
  misc_feature (7)..(14): Crosslink between residues
  MOD_RES (14)..(14): Alpha-Me S5-pentenyl-alanine olefin amino acid connected by an all-carbon crosslinker comprising one double bond
QSQQTFADLWRLLAQN

SEQ ID NO: 734 - protein, 11 aa, Artificial Sequence
  Description of Artificial Sequence: Synthetic peptide
  MOD_RES (4)..(4): Alpha-Me R8-octenyl-alanine olefin amino acid connected by an all-carbon crosslinker comprising one double bond
  misc_feature (4)..(11): Crosslink between residues
  MOD_RES (11)..(11): Alpha-Me S5-pentenyl-alanine olefin amino acid connected by an all-carbon crosslinker comprising one double bond
QTFANLWRLLA

SEQ ID NO: 735 - protein, 16 aa, Artificial Sequence
  Description of Artificial Sequence: Synthetic peptide
  MOD_RES (7)..(7): Alpha-Me S5-pentenyl-alanine olefin amino acid connected by an all-carbon crosslinker comprising one double bond
  misc_feature (7)..(11): Crosslink between residues
  MOD_RES (11)..(11): Alpha-Me S5-pentenyl-alanine olefin amino acid connected by an all-carbon crosslinker comprising one double bond
QSQQTFANLWALLPQN

SEQ ID NO: 736 - protein, 16 aa, Artificial Sequence
  Description of Artificial Sequence: Synthetic peptide
  MOD_RES (3)..(3): Alpha-Me S5-pentenyl-alanine olefin amino acid connected by an all-carbon crosslinker comprising one double bond
  misc_feature (3)..(7): Crosslink between residues
  MOD_RES (7)..(7): Alpha-Me S5-pentenyl-alanine olefin amino acid connected by an all-carbon crosslinker comprising one double bond
QSAQTFANLWRLLPQN

SEQ ID NO: 737 - protein, 10 aa, Artificial Sequence
  Description of Artificial Sequence: Synthetic peptide
  MOD_RES (1)..(1): Alpha-Me S5-pentenyl-alanine olefin amino acid connected by an all-carbon crosslinker comprising one double bond
  misc_feature (1)..(5): Crosslink between residues
  MOD_RES (5)..(5): Alpha-Me S5-pentenyl-alanine olefin amino acid connected by an all-carbon crosslinker comprising one double bond
ATFSALWKLL

SEQ ID NO: 738 - protein, 10 aa, Artificial Sequence
  Description of Artificial Sequence: Synthetic peptide
  MOD_RES (4)..(4): Alpha-Me S5-pentenyl-alanine olefin amino acid connected by an all-carbon crosslinker comprising one double bond
  misc_feature (4)..(8): Crosslink between residues
  MOD_RES (8)..(8): Alpha-Me S5-pentenyl-alanine olefin amino acid connected by an all-carbon crosslinker comprising one double bond
ETFADLWALL

SEQ ID NO: 739 - protein, 10 aa, Artificial Sequence
  Description of Artificial Sequence: Synthetic peptide
  MOD_RES (4)..(4): Alpha-Me S5-pentenyl-alanine olefin amino acid connected by an all-carbon crosslinker comprising one double bond
  misc_feature (4)..(8): Crosslink between residues
  MOD_RES (8)..(8): Alpha-Me S5-pentenyl-alanine olefin amino acid connected by an all-carbon crosslinker comprising one double bond
QTFANLWALL

SEQ ID NO: 740 - protein, 13 aa, Artificial Sequence
  Description of Artificial Sequence: Synthetic peptide
  MOD_RES (1)..(1): Alpha-Me S5-pentenyl-alanine olefin amino acid connected by an all-carbon crosslinker comprising one double bond
  misc_feature (1)..(5): Crosslink between residues
  MOD_RES (5)..(5): Alpha-Me S5-pentenyl-alanine olefin amino acid connected by an all-carbon crosslinker comprising one double bond
ASQEAFSNLWKLL

SEQ ID NO: 741 - protein, 16 aa, Artificial Sequence
  Description of Artificial Sequence: Synthetic peptide
  N-term Ac
  MOD_RES (7)..(7): Alpha-Me R8-octenyl-alanine olefin amino acid connected by an all-carbon crosslinker comprising one double bond
  misc_feature (7)..(14): Crosslink between residues
  MOD_RES (14)..(14): Alpha-Me S5-pentenyl-alanine olefin amino acid connected by an all-carbon crosslinker comprising one double bond
  C-term NH2
LSQETFADLWKLLAEN

SEQ ID NO: 742 - protein, 16 aa, Artificial Sequence
  Description of Artificial Sequence: Synthetic peptide
  N-term Ac
  MOD_RES (7)..(7): Alpha-Me R8-octenyl-alanine olefin amino acid connected by an all-carbon crosslinker comprising one double bond
  misc_feature (7)..(14): Crosslink between residues
  MOD_RES (14)..(14): Alpha-Me S5-pentenyl-alanine olefin amino acid connected by an all-carbon crosslinker comprising one double bond
  C-term NH2
LSQETFANLWKLLAQN

SEQ ID NO: 743 - protein, 16 aa, Artificial Sequence
  Description of Artificial Sequence: Synthetic peptide
  N-term Ac
  MOD_RES (7)..(7): Alpha-Me R8-octenyl-alanine olefin amino acid connected by an all-carbon crosslinker comprising one double bond
  misc_feature (7)..(14): Crosslink between residues
  MOD_RES (14)..(14): Alpha-Me S5-pentenyl-alanine olefin amino acid connected by an all-carbon crosslinker comprising one double bond
  C-term NH2
LSQQTFANLWRLLAQN

SEQ ID NO: 744 - protein, 16 aa, Artificial Sequence
  Description of Artificial Sequence: Synthetic peptide
  N-term Ac
  MOD_RES (7)..(7): Alpha-Me R8-octenyl-alanine olefin amino acid connected by an all-carbon crosslinker comprising one double bond
  misc_feature (7)..(14): Crosslink between residues
  MOD_RES (14)..(14): Alpha-Me S5-pentenyl-alanine olefin amino acid connected by an all-carbon crosslinker comprising one double bond
  C-term NH2
QSQQTFANLWKLLAQN

SEQ ID NO: 745 - protein, 16 aa, Artificial Sequence
  Description of Artificial Sequence: Synthetic peptide
  N-term Ac
  MOD_RES (7)..(7): Alpha-Me R8-octenyl-alanine olefin amino acid connected by an all-carbon crosslinker comprising one double bond
  misc_feature (7)..(14): Crosslink between residues
  MOD_RES (14)..(14): Alpha-Me S5-pentenyl-alanine olefin amino acid connected by an all-carbon crosslinker comprising one double bond
  C-term NH2
QSQQTFANLWRLLAQN

SEQ ID NO: 746 - protein, 16 aa, Artificial Sequence
  Description of Artificial Sequence: Synthetic peptide
  N-term Ac
  MOD_RES (7)..(7): Alpha-Me R8-octenyl-alanine olefin amino acid connected by an all-carbon crosslinker comprising one double bond
  misc_feature (7)..(14): Crosslink between residues
  MOD_RES (14)..(14): Alpha-Me S5-pentenyl-alanine olefin amino acid connected by an all-carbon crosslinker comprising one double bond
  C-term NH2
QSQQTAANLWRLLAQN

SEQ ID NO: 747 - protein, 16 aa, Artificial Sequence
  Description of Artificial Sequence: Synthetic peptide
  N-term Ac
  MOD_RES (2)..(2): 2-aminoisobutyric acid
  MOD_RES (7)..(7): Alpha-Me R8-octenyl-alanine olefin amino acid connected by an all-carbon crosslinker comprising one double bond
  misc_feature (7)..(14): Crosslink between residues
  MOD_RES (14)..(14): Alpha-Me S5-pentenyl-alanine olefin amino acid connected by an all-carbon crosslinker comprising one double bond
  C-term NH2
QXQQTFANLWRLLAQN

SEQ ID NO: 748 - protein, 16 aa, Artificial Sequence
  Description of Artificial Sequence: Synthetic peptide
  N-term Ac
  C-term NH2
QSQQTFSNLWRLLPQN

SEQ ID NO: 749 - protein, 16 aa, Artificial Sequence
  Description of Artificial Sequence: Synthetic peptide
  N-term Ac
  MOD_RES (7)..(7): Alpha-Me R8-octenyl-alanine olefin amino acid that is not connected by a crosslinker
  MOD_RES (14)..(14): Alpha-Me S5-pentenyl-alanine olefin amino acid that is not connected by a crosslinker
  C-term NH2
QSQQTFANLWRLLAQN

SEQ ID NO: 750 - protein, 16 aa, Artificial Sequence
  Description of Artificial Sequence: Synthetic peptide
  N-term Ac
  MOD_RES (4)..(4): 2-aminoisobutyric acid
  MOD_RES (7)..(7): Alpha-Me R8-octenyl-alanine olefin amino acid connected by an all-carbon crosslinker comprising one double bond
  misc_feature (7)..(14): Crosslink between residues
  MOD_RES (14)..(14): Alpha-Me S5-pentenyl-alanine olefin amino acid connected by an all-carbon crosslinker comprising one double bond
  C-term NH2
QSQXTFANLWRLLAQN

SEQ ID NO: 751 - protein, 16 aa, Artificial Sequence
  Description of Artificial Sequence: Synthetic peptide
  N-term Ac
  MOD_RES (7)..(7): Alpha-Me R8-octenyl-alanine olefin amino acid connected by an all-carbon crosslinker comprising one double bond
  misc_feature (7)..(14): Crosslink between residues
  MOD_RES (14)..(14): Alpha-Me S5-pentenyl-alanine olefin amino acid connected by an all-carbon crosslinker comprising one double bond
  C-term NH2
QSQQTFANLWRLLAAN

SEQ ID NO: 752 - protein, 16 aa, Artificial Sequence
  Description of Artificial Sequence: Synthetic peptide
  N-term Ac
  MOD_RES (7)..(7): Alpha-Me R8-octenyl-alanine olefin amino acid connected by an all-carbon crosslinker comprising one double bond
  misc_feature (7)..(14): Crosslink between residues
  MOD_RES (14)..(14): Alpha-Me S5-pentenyl-alanine olefin amino acid connected by an all-carbon crosslinker comprising one double bond
  C-term NH2
ASQQTFANLWRLLAQN

SEQ ID NO: 753 - protein, 16 aa, Artificial Sequence
  Description of Artificial Sequence: Synthetic peptide
  N-term Ac
  MOD_RES (7)..(7): Alpha-Me R8-octenyl-alanine olefin amino acid connected by an all-carbon crosslinker comprising one double bond
  misc_feature (7)..(14): Crosslink between residues
  MOD_RES (14)..(14): Alpha-Me S5-pentenyl-alanine olefin amino acid connected by an all-carbon crosslinker comprising one double bond
  C-term NH2
QSQQTFAALWRLLAQN

SEQ ID NO: 754 - protein, 16 aa, Artificial Sequence
  Description of Artificial Sequence: Synthetic peptide
  N-term Ac
  MOD_RES (7)..(7): Alpha-Me R8-octenyl-alanine olefin amino acid connected by an all-carbon crosslinker comprising one double bond
  misc_feature (7)..(14): Crosslink between residues
  MOD_RES (14)..(14): Alpha-Me S5-pentenyl-alanine olefin amino acid connected by an all-carbon crosslinker comprising one double bond
  C-term NH2
QSQETFANLWRLLAQN

SEQ ID NO: 755 - protein, 16 aa, Artificial Sequence
  Description of Artificial Sequence: Synthetic peptide
  N-term Ac
  MOD_RES (7)..(7): Alpha-Me R8-octenyl-alanine olefin amino acid connected by an all-carbon crosslinker comprising one double bond
  misc_feature (7)..(14): Crosslink between residues
  MOD_RES (14)..(14): Alpha-Me S5-pentenyl-alanine olefin amino acid connected by an all-carbon crosslinker comprising one double bond
  C-term NH2
RSQQTFANLWRLLAQN

SEQ ID NO: 756 - protein, 16 aa, Artificial Sequence
  Description of Artificial Sequence: Synthetic peptide
  N-term Ac
  MOD_RES (7)..(7): Alpha-Me R8-octenyl-alanine olefin amino acid connected by an all-carbon crosslinker comprising one double bond
  misc_feature (7)..(14): Crosslink between residues
  MOD_RES (14)..(14): Alpha-Me S5-pentenyl-alanine olefin amino acid connected by an all-carbon crosslinker comprising one double bond
  C-term NH2
RSQQTFANLWRLLAEN

SEQ ID NO: 757 - protein, 16 aa, Artificial Sequence
  Description of Artificial Sequence: Synthetic peptide
  N-term Ac
  C-term NH2
LSQETFSDLWKLLPEN

SEQ ID NO: 758 - protein, 16 aa, Artificial Sequence
  Description of Artificial Sequence: Synthetic peptide
  N-term Ac
  MOD_RES (4)..(4): Alpha-Me S5-pentenyl-alanine olefin amino acid connected by an all-carbon crosslinker comprising one double bond
  misc_feature (4)..(8): Crosslink between residues
  MOD_RES (8)..(8): Alpha-Me S5-pentenyl-alanine olefin amino acid connected by an all-carbon crosslinker comprising one double bond
  C-term NH2
QSQATFSALWRLLPQN

SEQ ID NO: 759 - protein, 16 aa, Artificial Sequence
  Description of Artificial Sequence: Synthetic peptide
  N-term Ac
  MOD_RES (5)..(5): Alpha-Me S5-pentenyl-alanine olefin amino acid connected by an all-carbon crosslinker comprising one double bond
  misc_feature (5)..(9): Crosslink between residues
  MOD_RES (9)..(9): Alpha-Me S5-pentenyl-alanine olefin amino acid connected by an all-carbon crosslinker comprising one double bond
  C-term NH2
QSQQAFSNAWRLLPQN

SEQ ID NO: 760 - protein, 16 aa, Artificial Sequence
  Description of Artificial Sequence: Synthetic peptide
  N-term Ac
  MOD_RES (6)..(6): Alpha-Me S5-pentenyl-alanine olefin amino acid connected by an all-carbon crosslinker comprising one double bond
  misc_feature (6)..(10): Crosslink between residues
  MOD_RES (10)..(10): Alpha-Me S5-pentenyl-alanine olefin amino acid connected by an all-carbon crosslinker comprising one double bond
  C-term NH2
QSQQTASNLARLLPQN

SEQ ID NO: 761 - protein, 16 aa, Artificial Sequence
  Description of Artificial Sequence: Synthetic peptide
  N-term Ac
  MOD_RES (7)..(7): Alpha-Me S5-pentenyl-alanine olefin amino acid connected by an all-carbon crosslinker comprising one double bond
  misc_feature (7)..(11): Crosslink between residues
  MOD_RES (11)..(11): Alpha-Me S5-pentenyl-alanine olefin amino acid connected by an all-carbon crosslinker comprising one double bond
  C-term NH2
QSQQTFANLWALLPQN

SEQ ID NO: 762 - protein, 19 aa, Artificial Sequence
  Description of Artificial Sequence: Synthetic peptide
  N-term Ac
  MOD_RES (7)..(7): Alpha-Me R8-octenyl-alanine olefin amino acid connected by an all-carbon crosslinker comprising one double bond
  misc_feature (7)..(14): Crosslink between residues
  MOD_RES (11)..(11): 2-aminoisobutyric acid
  MOD_RES (13)..(13): Norleucine
  MOD_RES (14)..(14): Alpha-Me S5-pentenyl-alanine olefin amino acid connected by an all-carbon crosslinker comprising one double bond
  MOD_RES (17)..(17): 2-aminoisobutyric acid
  C-term NH2
RTQATFANQWXALATNXTR

SEQ ID NO: 763 - protein, 16 aa, Artificial Sequence
  Description of Artificial Sequence: Synthetic peptide
  N-term Ac
  MOD_RES (7)..(7): Alpha-Me R8-octenyl-alanine olefin amino acid connected by an all-carbon crosslinker comprising one double bond
  misc_feature (7)..(14): Crosslink between residues
  MOD_RES (14)..(14): Alpha-Me S5-pentenyl-alanine olefin amino acid connected by an all-carbon crosslinker comprising one double bond
  C-term NH2
QSQQTFANLWRLLARN

SEQ ID NO: 764 - protein, 16 aa, Artificial Sequence
  Description of Artificial Sequence: Synthetic peptide
  N-term Ac
  MOD_RES (7)..(7): Alpha-Me R8-octenyl-alanine olefin amino acid connected by an all-carbon crosslinker comprising one double bond
  misc_feature (7)..(14): Crosslink between residues
  MOD_RES (14)..(14): Alpha-Me S5-pentenyl-alanine olefin amino acid connected by an all-carbon crosslinker comprising one double bond
  C-term NH2
QSQRTFANLWRLLAQN

SEQ ID NO: 765 - protein, 16 aa, Artificial Sequence
  Description of Artificial Sequence: Synthetic peptide
  N-term Ac
  MOD_RES (7)..(7): Alpha-Me R8-octenyl-alanine olefin amino acid connected by an all-carbon crosslinker comprising one double bond
  misc_feature (7)..(14): Crosslink between residues
  MOD_RES (9)..(9): Norleucine
  MOD_RES (14)..(14): Alpha-Me S5-pentenyl-alanine olefin amino acid connected by an all-carbon crosslinker comprising one double bond
  C-term NH2
QSQQTFANLWRLLAQN

SEQ ID NO: 766 - protein, 16 aa, Artificial Sequence
  Description of Artificial Sequence: Synthetic peptide
  N-term Ac
  MOD_RES (7)..(7): Alpha-Me R8-octenyl-alanine olefin amino acid connected by an all-carbon crosslinker comprising one double bond
  misc_feature (7)..(14): Crosslink between residues
  MOD_RES (12)..(12): Norleucine
  MOD_RES (14)..(14): Alpha-Me S5-pentenyl-alanine olefin amino acid connected by an all-carbon crosslinker comprising one double bond
  C-term NH2
QSQQTFANLWRLLAQN

SEQ ID NO: 767 - protein, 16 aa, Artificial Sequence
  Description of Artificial Sequence: Synthetic peptide
  N-term Ac
  MOD_RES (7)..(7): Alpha-Me R8-octenyl-alanine olefin amino acid connected by an all-carbon crosslinker comprising one double bond
  misc_feature (7)..(14): Crosslink between residues
  MOD_RES (13)..(13): Norleucine
  MOD_RES (14)..(14): Alpha-Me S5-pentenyl-alanine olefin amino acid connected by an all-carbon crosslinker comprising one double bond
  C-term NH2
QSQQTFANLWRLLAQN

SEQ ID NO: 768 - protein, 16 aa, Artificial Sequence
  Description of Artificial Sequence: Synthetic peptide
  N-term Ac
  MOD_RES (7)..(7): Alpha-Me R8-octenyl-alanine olefin amino acid connected by an all-carbon crosslinker comprising one double bond
  misc_feature (7)..(14): Crosslink between residues
  MOD_RES (14)..(14): Alpha-Me S5-pentenyl-alanine olefin amino acid connected by an all-carbon crosslinker comprising one double bond
  C-term NH2
QSQQTYANLWRLLAQN

SEQ ID NO: 769 - protein, 16 aa, Artificial Sequence
  Description of Artificial Sequence: Synthetic peptide
  N-term Ac
  MOD_RES (2)..(2): 2-aminoisobutyric acid
  MOD_RES (7)..(7): Alpha-Me R8-octenyl-alanine olefin amino acid connected by an all-carbon crosslinker comprising one double bond
  misc_feature (7)..(14): Crosslink between residues
  MOD_RES (14)..(14): Alpha-Me S5-pentenyl-alanine olefin amino acid connected by an all-carbon crosslinker comprising one double bond
  C-term NH2
RXQQTFANLWRLLAQN

SEQ ID NO: 770 - protein, 12 aa, Artificial Sequence
  Description of Artificial Sequence: Synthetic peptide
  N-term Ac
  C-term NH2
MPRFMDYWEGLN

SEQ ID NO: 771 - protein, 16 aa, Artificial Sequence
  Description of Artificial Sequence: Synthetic peptide
  N-term Ac
  MOD_RES (7)..(7): Alpha-Me R8-octenyl-alanine olefin amino acid connected by an all-carbon crosslinker comprising one double bond
  misc_feature (7)..(14): Crosslink between residues
  MOD_RES (14)..(14): Alpha-Me S5-pentenyl-alanine olefin amino acid connected by an all-carbon crosslinker comprising one double bond
  C-term NH2
RSQQRFANLWRLLAQN

SEQ ID NO: 772 - protein, 16 aa, Artificial Sequence
  Description of Artificial Sequence: Synthetic peptide
  N-term Ac
  MOD_RES (7)..(7): Alpha-Me R8-octenyl-alanine olefin amino acid connected by an all-carbon crosslinker comprising one double bond
  misc_feature (7)..(14): Crosslink between residues
  MOD_RES (14)..(14): Alpha-Me S5-pentenyl-alanine olefin amino acid connected by an all-carbon crosslinker comprising one double bond
  C-term NH2
QSQQRFANLWRLLAQN

SEQ ID NO: 773 - protein, 16 aa, Artificial Sequence
  Description of Artificial Sequence: Synthetic peptide
  N-term Ac
  MOD_RES (2)..(2): 2-aminoisobutyric acid
  MOD_RES (7)..(7): Alpha-Me R8-octenyl-alanine olefin amino acid connected by an all-carbon crosslinker comprising one double bond
  misc_feature (7)..(14): Crosslink between residues
  MOD_RES (14)..(14): Alpha-Me S5-pentenyl-alanine olefin amino acid connected by an all-carbon crosslinker comprising one double bond
  C-term NH2
RXQQRFANLWRLLAQN

SEQ ID NO: 774 - protein, 16 aa, Artificial Sequence
  Description of Artificial Sequence: Synthetic peptide
  N-term Ac
  MOD_RES (7)..(7): Alpha-Me R8-octenyl-alanine olefin amino acid connected by an all-carbon crosslinker comprising one double bond
  misc_feature (7)..(14): Crosslink between residues
  MOD_RES (14)..(14): Alpha-Me S5-pentenyl-alanine olefin amino acid connected by an all-carbon crosslinker comprising one double bond
  C-term NH2
RSQQRFANFWRLLAQN

SEQ ID NO: 775 - protein, 16 aa, Artificial Sequence
  Description of Artificial Sequence: Synthetic peptide
  N-term Ac
  MOD_RES (7)..(7): Alpha-Me R8-octenyl-alanine olefin amino acid connected by an all-carbon crosslinker comprising one double bond
  misc_feature (7)..(14): Crosslink between residues
  MOD_RES (14)..(14): Alpha-Me S5-pentenyl-alanine olefin amino acid connected by an all-carbon crosslinker comprising one double bond
  C-term NH2
RSQQRFANYWRLLAQN

SEQ ID NO: 776 - protein, 16 aa, Artificial Sequence
  Description of Artificial Sequence: Synthetic peptide
  N-term Ac
  MOD_RES (7)..(7): Alpha-Me R8-octenyl-alanine olefin amino acid connected by an all-carbon crosslinker comprising one double bond
  misc_feature (7)..(14): Crosslink between residues
  MOD_RES (14)..(14): Alpha-Me S5-pentenyl-alanine olefin amino acid connected by an all-carbon crosslinker comprising one double bond
  C-term NH2
RSQQTFANLWQLLAQN

SEQ ID NO: 777 - protein, 16 aa, Artificial Sequence
  Description of Artificial Sequence: Synthetic peptide
  N-term Ac
  MOD_RES (7)..(7): Alpha-Me R8-octenyl-alanine olefin amino acid connected by an all-carbon crosslinker comprising one double bond
  misc_feature (7)..(14): Crosslink between residues
  MOD_RES (12)..(12): Alpha-Me-Leu
  MOD_RES (14)..(14): Alpha-Me S5-pentenyl-alanine olefin amino acid connected by an all-carbon crosslinker comprising one double bond
  C-term NH2
QSQQTFANLWQLLAQN

SEQ ID NO: 778 - protein, 16 aa, Artificial Sequence
  Description of Artificial Sequence: Synthetic peptide
  N-term Ac
  MOD_RES (7)..(7): Alpha-Me R8-octenyl-alanine olefin amino acid connected by an all-carbon crosslinker comprising one double bond
  misc_feature (7)..(14): Crosslink between residues
  MOD_RES (9)..(9): Alpha-Me-Leu
  MOD_RES (14)..(14): Alpha-Me S5-pentenyl-alanine olefin amino acid connected by an all-carbon crosslinker comprising one double bond
  C-term NH2
QSQQTFANLWRLLAQN

SEQ ID NO: 779 - protein, 14 aa, Artificial Sequence
  Description of Artificial Sequence: Synthetic peptide
  N-term Ac
  MOD_RES (1)..(1): Norleucine
  MOD_RES (5)..(5): Alpha-Me R8-octenyl-alanine olefin amino acid connected by an all-carbon crosslinker comprising one double bond
  misc_feature (5)..(12): Crosslink between residues
  MOD_RES (12)..(12): Alpha-Me S5-pentenyl-alanine olefin amino acid connected by an all-carbon crosslinker comprising one double bond
  C-term NH2
LPRFADYWEGLAQN

SEQ ID NO: 780 - protein, 14 aa, Artificial Sequence
  Description of Artificial Sequence: Synthetic peptide
  N-term Ac
  MOD_RES (1)..(1): Norleucine
  MOD_RES (5)..(5): Alpha-Me R8-octenyl-alanine olefin amino acid connected by an all-carbon crosslinker comprising one double bond
  misc_feature (5)..(12): Crosslink between residues
  MOD_RES (12)..(12): Alpha-Me S5-pentenyl-alanine olefin amino acid connected by an all-carbon crosslinker comprising one double bond
  C-term NH2
LPRFANYWRLLAQN

SEQ ID NO: 781 - protein, 11 aa, Artificial Sequence
  Description of Artificial Sequence: Synthetic peptide
  N-term Ac
  MOD_RES (3)..(3): Alpha-Me R8-octenyl-alanine olefin amino acid connected by an all-carbon crosslinker comprising one double bond
  misc_feature (3)..(10): Crosslink between residues
  MOD_RES (10)..(10): Alpha-Me S5-pentenyl-alanine olefin amino acid connected by an all-carbon crosslinker comprising one double bond
  C-term NH2
RFANLWRLLAQ

SEQ ID NO: 782 - protein, 16 aa, Artificial Sequence
  Description of Artificial Sequence: Synthetic peptide
  N-term Ac
  MOD_RES (7)..(7): Alpha-Me R8-octenyl-alanine olefin amino acid connected by an all-carbon crosslinker comprising one double bond
  misc_feature (7)..(14): Crosslink between residues
  MOD_RES (9)..(9): 2-fluoro-Phe
  MOD_RES (14)..(14): Alpha-Me S5-pentenyl-alanine olefin amino acid connected by an all-carbon crosslinker comprising one double bond
  C-term NH2
QSQQTFANFWRLLAQN

SEQ ID NO: 783 - protein, 16 aa, Artificial Sequence
  Description of Artificial Sequence: Synthetic peptide
  N-term Ac
  MOD_RES (7)..(7): Alpha-Me R8-octenyl-alanine olefin amino acid connected by an all-carbon crosslinker comprising one double bond
  misc_feature (7)..(14): Crosslink between residues
  MOD_RES (9)..(9): 3-fluoro-Phe
  MOD_RES (14)..(14): Alpha-Me S5-pentenyl-alanine olefin amino acid connected by an all-carbon crosslinker comprising one double bond
  C-term NH2
QSQQTFANFWRLLAQN

SEQ ID NO: 784 - protein, 16 aa, Artificial Sequence
  Description of Artificial Sequence: Synthetic peptide
  N-term Ac
  MOD_RES (7)..(7): Alpha-hydrogen R8-octenyl-alanine olefin amino acid connected by an all-carbon saturated crosslinker with no double bond
  misc_feature (7)..(14): Crosslink between residues
  MOD_RES (14)..(14): Alpha-hydrogen S5-pentenyl-alanine olefin amino acid connected by an all-carbon saturated crosslinker with no double bond
  C-term NH2
QSQQTFANLWRLLAQN

SEQ ID NO: 785 - protein, 16 aa, Artificial Sequence
  Description of Artificial Sequence: Synthetic peptide
  N-term Ac
  MOD_RES (7)..(7): Alpha-Me R8-octenyl-alanine olefin amino acid connected by an all-carbon crosslinker comprising one double bond
  misc_feature (7)..(14): Crosslink between residues
  MOD_RES (14)..(14): Alpha-Me S5-pentenyl-alanine olefin amino acid connected by an all-carbon crosslinker comprising one double bond
  C-term NH2
RSQQTAANLWRLLAQN

SEQ ID NO: 786 - protein, 16 aa, Artificial Sequence
  Description of Artificial Sequence: Synthetic peptide
  N-term Ac
  MOD_RES (7)..(7): Alpha-Me R8-octenyl-alanine olefin amino acid connected by an all-carbon crosslinker comprising no double bonds
  misc_feature (7)..(14): Crosslink between residues
  MOD_RES (14)..(14): Alpha-Me S5-pentenyl-alanine olefin amino acid connected by an all-carbon crosslinker comprising no double bonds
  C-term NH2
QSQQTFANLWRLLAQN

SEQ ID NO: 787 - protein, 16 aa, Artificial Sequence
  Description of Artificial Sequence: Synthetic peptide
  N-term acetylated with heptanoic acid and connected to internal olefin amino acid by an all-carbon crosslinker to position 4 comprising one double bond
  MOD_RES (4)..(4): Alpha-Me S5-pentenyl-alanine olefin amino acid connected by an all-carbon crosslinker to the N-term comprising one double bond
  C-term NH2
QSQATFSNLWRLLPQN

SEQ ID NO: 788 - protein, 16 aa, Artificial Sequence
  Description of Artificial Sequence: Synthetic peptide
  N-term acetylated with heptanoic acid and connected to internal olefin amino acid by an all-carbon crosslinker to position 4 comprising one double bond
  MOD_RES (4)..(4): Alpha-Me S5-pentenyl-alanine olefin amino acid connected by an all-carbon crosslinker to the N-term comprising one double bond
  MOD_RES (7)..(7): Alpha-Me R8-octenyl-alanine olefin amino acid connected by an all-carbon crosslinker comprising one double bond
  misc_feature (7)..(14): Crosslink between residues
  MOD_RES (14)..(14): Alpha-Me S5-pentenyl-alanine olefin amino acid connected by an all-carbon crosslinker comprising one double bond
  C-term NH2
QSQATFANLWRLLAQN

SEQ ID NO: 789 - protein, 16 aa, Artificial Sequence
  Description of Artificial Sequence: Synthetic peptide
  N-term Ac
  MOD_RES (7)..(7): Alpha-Me R8-octenyl-alanine olefin amino acid connected by an all-carbon crosslinker comprising one double bond
  misc_feature (7)..(14): Crosslink between residues
  MOD_RES (10)..(10): 6cl-Trp
  MOD_RES (14)..(14): Alpha-Me S5-pentenyl-alanine olefin amino acid connected by an all-carbon crosslinker comprising one double bond
  C-term NH2
QSQQTFANLWRLLAQN

SEQ ID NO: 790 - protein, 16 aa, Artificial Sequence
  Description of Artificial Sequence: Synthetic peptide
  N-term Ac
  MOD_RES (7)..(7): Alpha-Me R8-octenyl-alanine olefin amino acid connected by an all-carbon crosslinker comprising one double bond
  misc_feature (7)..(14): Crosslink between residues
  MOD_RES (10)..(10): Me6cl-Trp
  MOD_RES (14)..(14): Alpha-Me S5-pentenyl-alanine olefin amino acid connected by an all-carbon crosslinker comprising one double bond
  C-term NH2
QSQQTFANLWRLLAQN

SEQ ID NO: 791 - protein, 12 aa, Artificial Sequence
  Description of Artificial Sequence: Synthetic peptide
  N-term Ac
  C-term NH2
LTFEHYWAQLTS

SEQ ID NO: 792 - protein, 12 aa, Artificial Sequence
  Description of Artificial Sequence: Synthetic peptide
  N-term Ac
  MOD_RES (4)..(4): Alpha-Me S5-pentenyl-alanine olefin amino acid connected by an all-carbon crosslinker comprising one double bond
  misc_feature (4)..(8): Crosslink between residues
  MOD_RES (8)..(8): Alpha-Me S5-pentenyl-alanine olefin amino acid connected by an all-carbon crosslinker comprising one double bond
  C-term NH2
LTFAHYWAQLTS

SEQ ID NO: 793 - protein, 12 aa, Artificial Sequence
  Description of Artificial Sequence: Synthetic peptide
  N-term Ac
  MOD_RES (5)..(5): Alpha-Me S5-pentenyl-alanine olefin amino acid connected by an all-carbon crosslinker comprising one double bond
  misc_feature (5)..(9): Crosslink between residues
  MOD_RES (9)..(9): Alpha-Me S5-pentenyl-alanine olefin amino acid connected by an all-carbon crosslinker comprising one double bond
  C-term NH2
LTFEAYWAALTS

SEQ ID NO: 794 - protein, 12 aa, Artificial Sequence
  Description of Artificial Sequence: Synthetic peptide
  N-term Ac
  MOD_RES (4)..(4): Alpha-Me R8-octenyl-alanine olefin amino acid connected by an all-carbon crosslinker comprising one Z configured double bond
  misc_feature (4)..(11): Crosslink between residues
  MOD_RES (11)..(11): Alpha-Me S5-pentenyl-alanine olefin amino acid connected by an all-carbon crosslinker comprising one Z configured double bond
  C-term NH2
LTFAHYWAQLAS

SEQ ID NO: 795 - protein, 12 aa, Artificial Sequence
  Description of Artificial Sequence: Synthetic peptide
  N-term Ac
  MOD_RES (4)..(4): Alpha-Me R8-octenyl-alanine olefin amino acid connected by an all-carbon crosslinker comprising one double bond
  misc_feature (4)..(11): Crosslink between residues
  MOD_RES (11)..(11): Alpha-Me S5-pentenyl-alanine olefin amino acid connected by an all-carbon crosslinker comprising one double bond
  C-term NH2
LTFAHYWRQLAS

SEQ ID NO: 796 - protein, 16 aa, Artificial Sequence
  Description of Artificial Sequence: Synthetic peptide
  N-term Ac
  MOD_RES (3)..(3): Alpha-Me S5-pentenyl-alanine olefin amino acid connected by an all-carbon crosslinker comprising one double bond
  misc_feature (3)..(7): Crosslink between residues
  MOD_RES (7)..(7): Two pentenyl-alanine olefin side chains, each of which is crosslinked to another amino acid as indicated
  misc_feature (7)..(14): Crosslink between residues
  MOD_RES (14)..(14): Alpha-Me S8-octenyl-alanine olefin amino acid connected by an all-carbon crosslinker comprising one double bond
  C-term NH2
QSAQTFANLWRLLAQN

SEQ ID NO: 797 - protein, 16 aa, Artificial Sequence
  Description of Artificial Sequence: Synthetic peptide
  N-term Ac
  C-term NH2
QSQQTASNLWRLLPQN

SEQ ID NO: 798 - protein, 16 aa, Artificial Sequence
  Description of Artificial Sequence: Synthetic peptide
  N-term Ac
  MOD_RES (7)..(7): Alpha-Me R8-octenyl-alanine olefin amino acid that is not connected by a crosslinker
  MOD_RES (14)..(14): Alpha-Me S5-pentenyl-alanine olefin amino acid that is not connected by a crosslinker
  C-term NH2
QSQQTAANLWRLLAQN

SEQ ID NO: 799 - protein, 16 aa, Artificial Sequence
  Description of Artificial Sequence: Synthetic peptide
  N-term Ac
  MOD_RES (7)..(7): Alpha-Me R8-octenyl-alanine olefin amino acid that is not connected by a crosslinker
  MOD_RES (14)..(14): Alpha-Me S5-pentenyl-alanine olefin amino acid that is not connected by a crosslinker
  C-term NH2
ASQQTFANLWRLLAQN

SEQ ID NO: 800 - protein, 16 aa, Artificial Sequence
  Description of Artificial Sequence: Synthetic peptide
  N-term Ac
  MOD_RES (1)..(1): Alpha-Me S5-pentenyl-alanine olefin amino acid connected by an all-carbon crosslinker comprising one double bond
  misc_feature (1)..(5): Crosslink between residues
  MOD_RES (5)..(5): Alpha-Me S5-pentenyl-alanine olefin amino acid connected by an all-carbon crosslinker comprising one double bond
  MOD_RES (14)..(14): 2-aminoisobutyric acid
  C-term NH2
ASQQAFSNLWRLLXQN

SEQ ID NO: 801 - protein, 16 aa, Artificial Sequence
  Description of Artificial Sequence: Synthetic peptide
  N-term Ac
  MOD_RES (3)..(3): Alpha-Me S5-pentenyl-alanine olefin amino acid connected by an all-carbon crosslinker comprising one double bond
  misc_feature (3)..(7): Crosslink between residues
  MOD_RES (7)..(7): Alpha-Me S5-pentenyl-alanine olefin amino acid connected by an all-carbon crosslinker comprising one double bond
  MOD_RES (14)..(14): 2-aminoisobutyric acid
  C-term NH2
QSAQTFANLWRLLXQN

SEQ ID NO: 802 - protein, 16 aa, Artificial Sequence
  Description of Artificial Sequence: Synthetic peptide
  N-term Ac
  MOD_RES (5)..(5): Alpha-Me S5-pentenyl-alanine olefin amino acid connected by an all-carbon crosslinker comprising one double bond
  misc_feature (5)..(9): Crosslink between residues
  MOD_RES (9)..(9): Alpha-Me S5-pentenyl-alanine olefin amino acid connected by an all-carbon crosslinker comprising one double bond
  MOD_RES (14)..(14): 2-aminoisobutyric acid
  C-term NH2
QSQQAFSNAWRLLXQN

SEQ ID NO: 803 - protein, 16 aa, Artificial Sequence
  Description of Artificial Sequence: Synthetic peptide
  N-term Ac
  MOD_RES (7)..(7): Alpha-Me S5-pentenyl-alanine olefin amino acid connected by an all-carbon crosslinker comprising one double bond
  misc_feature (7)..(11): Crosslink between residues
  MOD_RES (11)..(11): Alpha-Me S5-pentenyl-alanine olefin amino acid connected by an all-carbon crosslinker comprising one double bond
  MOD_RES (14)..(14): 2-aminoisobutyric acid
  C-term NH2
QSQQTFANLWALLXQN

SEQ ID NO: 804 - protein, 16 aa, Artificial Sequence
  Description of Artificial Sequence: Synthetic peptide
  N-term Ac
  MOD_RES (8)..(8): Alpha-Me S5-pentenyl-alanine olefin amino acid connected by an all-carbon crosslinker comprising one double bond
  misc_feature (8)..(12): Crosslink between residues
  MOD_RES (12)..(12): Alpha-Me S5-pentenyl-alanine olefin amino acid connected by an all-carbon crosslinker comprising one double bond
  MOD_RES (14)..(14): 2-aminoisobutyric acid
  C-term NH2
QSQQTFSALWRALXQN

SEQ ID NO: 805 - protein, 16 aa, Artificial Sequence
  Description of Artificial Sequence: Synthetic peptide
  N-term Ac
  MOD_RES (11)..(11): Alpha-Me S5-pentenyl-alanine olefin amino acid connected by an all-carbon crosslinker comprising one double bond
  misc_feature (11)..(15): Crosslink between residues
  MOD_RES (15)..(15): Alpha-Me S5-pentenyl-alanine olefin amino acid connected by an all-carbon crosslinker comprising one double bond
  C-term NH2
QSQQTFSNLWALLAAN

SEQ ID NO: 806 - protein, 16 aa, Artificial Sequence
  Description of Artificial Sequence: Synthetic peptide
  N-term Ac
  MOD_RES (1)..(1): Alpha-Me S5-pentenyl-alanine olefin amino acid that is not connected by a crosslinker
  MOD_RES (5)..(5): Alpha-Me S5-pentenyl-alanine olefin amino acid that is not connected by a crosslinker
  MOD_RES (14)..(14): 2-aminoisobutyric acid
  C-term NH2
ASQQAFSNLWRLLXQN

SEQ ID NO: 807 - protein, 16 aa, Artificial Sequence
  Description of Artificial Sequence: Synthetic peptide
  N-term Ac
  MOD_RES (3)..(3): Alpha-Me S5-pentenyl-alanine olefin amino acid that is not connected by a crosslinker
  MOD_RES (7)..(7): Alpha-Me S5-pentenyl-alanine olefin amino acid that is not connected by a crosslinker
  MOD_RES (14)..(14): 2-aminoisobutyric acid
  C-term NH2
QSAQTFANLWRLLXQN

SEQ ID NO: 808 - protein, 16 aa, Artificial Sequence
  Description of Artificial Sequence: Synthetic peptide
  N-term Ac
  MOD_RES (5)..(5): Alpha-Me S5-pentenyl-alanine olefin amino acid that is not connected by a crosslinker
  MOD_RES (9)..(9): Alpha-Me S5-pentenyl-alanine olefin amino acid that is not connected by a crosslinker
  MOD_RES (14)..(14): 2-aminoisobutyric acid
  C-term NH2
QSQQAFSNAWRLLXQN

SEQ ID NO: 809 - protein, 16 aa, Artificial Sequence
  Description of Artificial Sequence: Synthetic peptide
  N-term Ac
  MOD_RES (7)..(7): Alpha-Me S5-pentenyl-alanine olefin amino acid that is not connected by a crosslinker
  MOD_RES (11)..(11): Alpha-Me S5-pentenyl-alanine olefin amino acid that is not connected by a crosslinker
  MOD_RES (14)..(14): 2-aminoisobutyric acid
  C-term NH2
QSQQTFANLWALLXQN

SEQ ID NO: 810 - protein, 16 aa, Artificial Sequence
  Description of Artificial Sequence: Synthetic peptide
  N-term Ac
  MOD_RES (4)..(4): Alpha-Me S5-pentenyl-alanine olefin amino acid connected by an all-carbon crosslinker comprising one double bond
  misc_feature (4)..(8): Crosslink between residues
  MOD_RES (8)..(8): Alpha-Me S5-pentenyl-alanine olefin amino acid connected by an all-carbon crosslinker comprising one double bond
  MOD_RES (14)..(14): 2-aminoisobutyric acid
  C-term NH2
QSQATFSALWRLLXQN

SEQ ID NO: 811 - protein, 16 aa, Artificial Sequence
  Description of Artificial Sequence: Synthetic peptide
  N-term Ac
  MOD_RES (4)..(4): Alpha-Me S5-pentenyl-alanine olefin amino acid that is not connected by a crosslinker
  MOD_RES (8)..(8): Alpha-Me S5-pentenyl-alanine olefin amino acid that is not connected by a crosslinker
  MOD_RES (14)..(14): 2-aminoisobutyric acid
  C-term NH2
QSQATFSALWRLLXQN

SEQ ID NO: 812 - protein, 16 aa, Artificial Sequence
  Description of Artificial Sequence: Synthetic peptide
  N-term Ac
  MOD_RES (3)..(3): Alpha-Me S5-pentenyl-alanine olefin amino acid not connected by any crosslinker
  MOD_RES (7)..(7): Amino acid comprising two pentenyl-alanine olefin side chains that are not crosslinked
  MOD_RES (14)..(14): Alpha-Me S8-octenyl-alanine olefin amino acid not connected by any crosslinker
  C-term NH2
QSAQTFANLWRLLAQN

SEQ ID NO: 813 - protein, 16 aa, Artificial Sequence
  Description of Artificial Sequence: Synthetic peptide
  N-term Ac
  MOD_RES (1)..(1): Alpha-Me R8-octenyl-alanine olefin amino acid connected by an all-carbon crosslinker comprising one double bond
  misc_feature (1)..(8): Crosslink between residues
  MOD_RES (8)..(8): Alpha-Me S5-pentenyl-alanine olefin amino acid connected by an all-carbon crosslinker comprising one double bond
  MOD_RES (14)..(14): 2-aminoisobutyric acid
  C-term NH2
ASQQTFSALWRLLXQN

SEQ ID NO: 814 - protein, 16 aa, Artificial Sequence
  Description of Artificial Sequence: Synthetic peptide
  N-term Ac
  MOD_RES (4)..(4): Alpha-Me R8-octenyl-alanine olefin amino acid connected by an all-carbon crosslinker comprising one double bond
  misc_feature (4)..(11): Crosslink between residues
  MOD_RES (11)..(11): Alpha-Me S5-pentenyl-alanine olefin amino acid connected by an all-carbon crosslinker comprising one double bond
  MOD_RES (14)..(14): 2-aminoisobutyric acid
  C-term NH2
QSQATFSNLWALLXQN

SEQ ID NO: 815 - protein, 16 aa, Artificial Sequence
  Description of Artificial Sequence: Synthetic peptide
  N-term Ac
  MOD_RES (8)..(8): Alpha-Me R8-octenyl-alanine olefin amino acid connected by an all-carbon crosslinker comprising one double bond
  misc_feature (8)..(15): Crosslink between residues
  MOD_RES (15)..(15): Alpha-Me S5-pentenyl-alanine olefin amino acid connected by an all-carbon crosslinker comprising one double bond
  C-term NH2
QSQQTFSALWRLLAAN

SEQ ID NO: 816 - protein, 16 aa, Artificial Sequence
  Description of Artificial Sequence: Synthetic peptide
  N-term Ac
  MOD_RES (3)..(3): Alpha-Me R5-pentenyl-alanine olefin amino acid connected by an all-carbon crosslinker comprising one double bond
  misc_feature (3)..(7): Crosslink between residues
  MOD_RES (7)..(7): Two pentenyl-alanine olefin side chains, each of which is crosslinked to another amino acid as indicated
  misc_feature (7)..(11): Crosslink between residues
  MOD_RES (11)..(11): Alpha-Me S5-pentenyl-alanine olefin amino acid connected by an all-carbon crosslinker comprising one double bond
  MOD_RES (14)..(14): 2-aminoisobutyric acid
  C-term NH2
QSAQTFANLWALLXQN

SEQ ID NO: 817 - protein, 16 aa, Artificial Sequence
  Description of Artificial Sequence: Synthetic peptide
  N-term Ac
  MOD_RES (1)..(1): Alpha-Me R8-octenyl-alanine olefin amino acid that is not connected by a crosslinker
  MOD_RES (8)..(8): Alpha-Me S5-pentenyl-alanine olefin amino acid that is not connected by a crosslinker
  MOD_RES (14)..(14): 2-aminoisobutyric acid
  C-term NH2
ASQQTFSALWRLLXQN

SEQ ID NO: 818 - protein, 16 aa, Artificial Sequence
  Description of Artificial Sequence: Synthetic peptide
  N-term Ac
  MOD_RES (4)..(4): Alpha-Me R8-octenyl-alanine olefin amino acid that is not connected by a crosslinker
  MOD_RES (11)..(11): Alpha-Me S5-pentenyl-alanine olefin amino acid that is not connected by a crosslinker
  MOD_RES (14)..(14): 2-aminoisobutyric acid
  C-term NH2
QSQATFSNLWALLXQN

SEQ ID NO: 819 - protein, 16 aa, Artificial Sequence
  Description of Artificial Sequence: Synthetic peptide
  N-term Ac
  MOD_RES (8)..(8): Alpha-Me R8-octenyl-alanine olefin amino acid that is not connected by a crosslinker
  MOD_RES (15)..(15): Alpha-Me S5-pentenyl-alanine olefin amino acid that is not connected by a crosslinker
  C-term NH2
QSQQTFSALWRLLAAN

SEQ ID NO: 820 - protein, 16 aa, Artificial Sequence
  Description of Artificial Sequence: Synthetic peptide
  N-term Ac
  MOD_RES (3)..(3): Alpha-Me R5-pentenyl-alanine olefin amino acid that is not connected by a crosslinker
  MOD_RES (7)..(7): Amino acid comprising two pentenyl-alanine olefin side chains that are not crosslinked
  MOD_RES (11)..(11): Alpha-Me S5-pentenyl-alanine olefin amino acid that is not connected by a crosslinker
  MOD_RES (14)..(14): 2-aminoisobutyric acid
  C-term NH2
QSAQTFANLWALLXQN

SEQ ID NO: 821 - protein, 16 aa, Artificial Sequence
  Description of Artificial Sequence: Synthetic peptide
  N-term Ac
  MOD_RES (14)..(14): 2-aminoisobutyric acid
  C-term NH2
QSQQTFSNLWRLLXQN

SEQ ID NO: 822 - protein, 16 aa, Artificial Sequence
  Description of Artificial Sequence: Synthetic peptide
  N-term acetylated with heptanoic acid
  MOD_RES (4)..(4): Alpha-Me S5-pentenyl-alanine olefin amino acid that is not connected by a crosslinker
  MOD_RES (7)..(7): Alpha-Me R8-octenyl-alanine olefin amino acid that is not connected by a crosslinker
  MOD_RES (14)..(14): Alpha-Me S5-pentenyl-alanine olefin amino acid that is not connected by a crosslinker
  C-term NH2
QSQATFANLWRLLAQN

SEQ ID NO: 823 - protein, 16 aa, Artificial Sequence
  Description of Artificial Sequence: Synthetic peptide
  N-term Ac
  MOD_RES (7)..(7): Alpha-Me R8-octenyl-alanine olefin amino acid connected by an all-carbon crosslinker comprising one double bond
  misc_feature (7)..(14): Crosslink between residues
  MOD_RES (14)..(14): Alpha-Me S5-pentenyl-alanine olefin amino acid connected by an all-carbon crosslinker comprising one double bond
  C-term NH2
ASQQTFANLRWLLAQN

SEQ ID NO: 824 - protein, 15 aa, Artificial Sequence
  Description of Artificial Sequence: Synthetic peptide
  N-term Ac
  MOD_RES (7)..(7): Alpha-Me R8-octenyl-alanine olefin amino acid that is not connected by a crosslinker
  MOD_RES (14)..(14): Alpha-Me S5-pentenyl-alanine olefin amino acid that is not connected by a crosslinker
  C-term NH2
QSQQTFANLWRLLAQ

SEQ ID NO: 825 - protein, 15 aa, Artificial Sequence
  Description of Artificial Sequence: Synthetic peptide
  N-term Ac
  MOD_RES (7)..(7): Alpha-Me R8-octenyl-alanine olefin amino acid connected by an all-carbon crosslinker comprising one double bond
  misc_feature (7)..(14): Crosslink between residues
  MOD_RES (14)..(14): Alpha-Me S5-pentenyl-alanine olefin amino acid connected by an all-carbon crosslinker comprising one double bond
  C-term NH2
QSQQTFANLWRLLAQ

SEQ ID NO: 826 - protein, 16 aa, Artificial Sequence
  Description of Artificial Sequence: Synthetic peptide
  N-term Ac
  MOD_RES (7)..(7): Alpha-Me R8-octenyl-alanine olefin amino acid connected by an all-carbon crosslinker comprising one double bond
  misc_feature (7)..(14): Crosslink between residues
  MOD_RES (14)..(14): Alpha-Me S5-pentenyl-alanine olefin amino acid connected by an all-carbon crosslinker comprising one double bond
  C-term NH2
AAARAAAAAARAAAAA

SEQ ID NO: 827 - protein, 13 aa, Artificial Sequence
  Description of Artificial Sequence: Synthetic peptide
  N-term Ac
  C-term NH2
LTFEHYWAQLTSA

SEQ ID NO: 828 - protein, 13 aa, Artificial Sequence
  Description of Artificial Sequence: Synthetic peptide
  N-term Ac
  MOD_RES (4)..(4): Alpha-Me R8-octenyl-alanine olefin amino acid connected by an all-carbon crosslinker comprising one double bond
  misc_feature (4)..(11): Crosslink between residues
  MOD_RES (11)..(11): Alpha-Me S5-pentenyl-alanine olefin amino acid connected by an all-carbon crosslinker comprising one double bond
  C-term NH2
LTFAHYWAQLASA

SEQ ID NO: 829 - protein, 16 aa, Artificial Sequence
  Description of Artificial Sequence: Synthetic peptide
  N-term Ac
  C-term NH2
ASQQTFSNLWRLLPQN

SEQ ID NO: 830 - protein, 16 aa, Artificial Sequence
  Description of Artificial Sequence: Synthetic peptide
  N-term Ac
  MOD_RES (3)..(3): Alpha-Me S5-pentenyl-alanine olefin amino acid connected by an all-carbon crosslinker comprising one double bond
  misc_feature (3)..(7): Crosslink between residues
  MOD_RES (7)..(7): Two pentenyl-alanine olefin side chains, each of which is crosslinked to another amino acid as indicated
  misc_feature (7)..(11): Crosslink between residues
  MOD_RES (11)..(11): Alpha-Me R5-pentenyl-alanine olefin amino acid connected by an all-carbon crosslinker comprising one double bond
  MOD_RES (14)..(14): 2-aminoisobutyric acid
  C-term NH2
QSAQTFANLWALLXQN

SEQ ID NO: 831 - protein, 16 aa, Artificial Sequence
  Description of Artificial Sequence: Synthetic peptide
  N-term Ac
  MOD_RES (7)..(7): 2-aminoisobutyric acid
  MOD_RES (14)..(14): 2-aminoisobutyric acid
  C-term NH2
QSQQTFXNLWRLLXQN

SEQ ID NO: 832 - protein, 16 aa, Artificial Sequence
  Description of Artificial Sequence: Synthetic peptide
  N-term Ac
  MOD_RES (7)..(7): Norleucine
  MOD_RES (14)..(14): Norleucine
  C-term NH2
QSQQTFLNLWRLLLQN

SEQ ID NO: 833 - protein, 16 aa, Artificial Sequence
  Description of Artificial Sequence: Synthetic peptide
  N-term Ac
  MOD_RES (7)..(7): Alpha-Me R8-octenyl-alanine olefin amino acid that is not connected by a crosslinker
  MOD_RES (14)..(14): 2-aminoisobutyric acid
  C-term NH2
QSQQTFANLWRLLXQN

SEQ ID NO: 834 - protein, 16 aa, Artificial Sequence
  Description of Artificial Sequence: Synthetic peptide
  N-term Ac
  MOD_RES (7)..(7): Alpha-Me R8-octenyl-alanine olefin amino acid that is not connected by a crosslinker
  MOD_RES (14)..(14): Norleucine
  C-term NH2
QSQQTFANLWRLLLQN

SEQ ID NO: 835 - protein, 16 aa, Artificial Sequence
  Description of Artificial Sequence: Synthetic peptide
  N-term Ac
  MOD_RES (7)..(7): 2-aminoisobutyric acid
  MOD_RES (14)..(14): Alpha-Me S5-pentenyl-alanine olefin amino acid that is not connected by a crosslinker
  C-term NH2
QSQQTFXNLWRLLAQN

SEQ ID NO: 836 - protein, 16 aa, Artificial Sequence
  Description of Artificial Sequence: Synthetic peptide
  N-term Ac
  MOD_RES (7)..(7): Norleucine
  MOD_RES (14)..(14): Alpha-Me S5-pentenyl-alanine olefin amino acid that is not connected by a crosslinker
  C-term NH2
QSQQTFLNLWRLLAQN

SEQ ID NO: 837 - protein, 16 aa, Artificial Sequence
  Description of Artificial Sequence: Synthetic peptide
  N-term Ac
  MOD_RES (7)..(7): Alpha-Me R8-octenyl-alanine olefin amino acid connected by an all-carbon crosslinker comprising no double bonds
  misc_feature (7)..(14): Crosslink between residues
  MOD_RES (10)..(10): 6cl-Trp
  MOD_RES (12)..(12): Norleucine
  MOD_RES (14)..(14): Alpha-Me S5-pentenyl-alanine olefin amino acid connected by an all-carbon crosslinker comprising no double bonds
  C-term NH2
QSQQTFANLWRLLAQN

SEQ ID NO: 838 - protein, 16 aa, Artificial Sequence
  Description of Artificial Sequence: Synthetic peptide
  N-term Ac
  MOD_RES (7)..(7): Alpha-Me R8-octenyl-alanine olefin amino acid connected by an all-carbon crosslinker comprising no double bonds
  misc_feature (7)..(3): Crosslink between residues
  MOD_RES (10)..(10): Me6clW
  MOD_RES (14)..(14): Alpha-Me S5-pentenyl-alanine olefin amino acid connected by an all-carbon crosslinker comprising no double bonds
  C-term NH2
QSQQTFANLWRLLAQN

SEQ ID NO: 839 - protein, 8 aa, Artificial Sequence
  Description of Artificial Sequence: Synthetic peptide
  N-term Ac
  MOD_RES (2)..(2): Norleucine
  MOD_RES (3)..(3): Alpha-Me S5-pentenyl-alanine olefin amino acid connected by an all-carbon crosslinker comprising one double bond
  misc_feature (3)..(7): Crosslink between residues
  MOD_RES (7)..(7): Alpha-Me S5-pentenyl-alanine olefin amino acid connected by an all-carbon crosslinker comprising one double bond
  C-term NH2
FLAYWEAL

SEQ ID NO: 840 - protein, 10 aa, Artificial Sequence
  Description of Artificial Sequence: Synthetic peptide
  N-term Ac
  MOD_RES (2)..(2): Alpha-Me R8-octenyl-alanine olefin amino acid connected by an all-carbon crosslinker comprising one double bond
  misc_feature (2)..(9): Crosslink between residues
  MOD_RES (9)..(9): Alpha-Me S5-pentenyl-alanine olefin amino acid connected by an all-carbon crosslinker comprising one double bond
  C-term NH2
FAAYWELLAA

SEQ ID NO: 841 - protein, 10 aa, Artificial Sequence
  Description of Artificial Sequence: Synthetic peptide
  N-term Ac
  MOD_RES (2)..(2): Alpha-Me R8-octenyl-alanine olefin amino acid connected by an all-carbon crosslinker comprising one double bond
  misc_feature (2)..(9): Crosslink between residues
  MOD_RES (9)..(9): Alpha-Me S5-pentenyl-alanine olefin amino acid connected by an all-carbon crosslinker comprising one double bond
  C-term NH2
FAAYWQLLAA

SEQ ID NO: 842 - protein, 14 aa, Artificial Sequence
  Description of Artificial Sequence: Synthetic peptide
  N-term Ac
  MOD_RES (1)..(1): Norleucine
  MOD_RES (5)..(5): Alpha-Me R8-octenyl-alanine olefin amino acid connected by an all-carbon crosslinker comprising one double bond
  misc_feature (5)..(12): Crosslink between residues
  MOD_RES (12)..(12): Alpha-Me S5-pentenyl-alanine olefin amino acid connected by an all-carbon crosslinker comprising one double bond
  C-term NH2
LPRFANYWELLAQN

SEQ ID NO: 843 - protein, 14 aa, Artificial Sequence
  Description of Artificial Sequence: Synthetic peptide
  N-term Ac
  MOD_RES (1)..(1): Norleucine
  MOD_RES (5)..(5): Alpha-Me R8-octenyl-alanine olefin amino acid connected by an all-carbon crosslinker comprising one double bond
  misc_feature (5)..(12): Crosslink between residues
  MOD_RES (12)..(12): Alpha-Me S5-pentenyl-alanine olefin amino acid connected by an all-carbon crosslinker comprising one double bond
  C-term NH2
LPRFADYWRLLAQN

SEQ ID NO: 844 - protein, 13 aa, Artificial Sequence
  Description of Artificial Sequence: Synthetic peptide
  N-term Ac
  MOD_RES (1)..(1): Norleucine
  MOD_RES (5)..(5): Alpha-Me R8-octenyl-alanine olefin amino acid connected by an all-carbon crosslinker comprising one double bond
  misc_feature (5)..(12): Crosslink between residues
  MOD_RES (12)..(12): Alpha-Me S5-pentenyl-alanine olefin amino acid connected by an all-carbon crosslinker comprising one double bond
  C-term NH2
LPRFANYWRLLAQ

SEQ ID NO: 845 - protein, 12 aa, Artificial Sequence
  Description of Artificial Sequence: Synthetic peptide
  N-term Ac
  MOD_RES (1)..(1): Norleucine
  MOD_RES (5)..(5): Alpha-Me R8-octenyl-alanine olefin amino acid connected by an all-carbon crosslinker comprising one double bond
  misc_feature (5)..(12): Crosslink between residues
  MOD_RES (12)..(12): Alpha-Me S5-pentenyl-alanine olefin amino acid connected by an all-carbon crosslinker comprising one double bond
  C-term NH2
LPRFANYWRLLA

SEQ ID NO: 846 - protein, 16 aa, Artificial Sequence
  Description of Artificial Sequence: Synthetic peptide
  N-term Ac
  MOD_RES (7)..(7): Alpha-Me R8-octenyl-alanine olefin amino acid connected by an all-carbon crosslinker comprising one double bond
  misc_feature (7)..(14): Crosslink between residues
  MOD_RES (14)..(14): Alpha-Me S5-pentenyl-alanine olefin amino acid connected by an all-carbon crosslinker comprising one double bond
  C-term NH2
QSQQTFADLWRLLAQN

SEQ ID NO: 847 - protein, 16 aa, Artificial Sequence
  Description of Artificial Sequence: Synthetic peptide
  N-term Ac
  MOD_RES (7)..(7): Alpha-Me R8-octenyl-alanine olefin amino acid connected by an all-carbon crosslinker comprising one double bond
  misc_feature (7)..(14): Crosslink between residues
  MOD_RES (14)..(14): Alpha-Me S5-pentenyl-alanine olefin amino acid connected by an all-carbon crosslinker comprising one double bond
  C-term NH2
QSQQTFANLWRLLAEN

SEQ ID NO: 848 - protein, 16 aa, Artificial Sequence
  Description of Artificial Sequence: Synthetic peptide
  N-term Ac
  MOD_RES (7)..(7): Alpha-Me R8-octenyl-alanine olefin amino acid connected by an all-carbon crosslinker comprising one double bond
  misc_feature (7)..(14): Crosslink between residues
  MOD_RES (14)..(14): Alpha-Me S5-pentenyl-alanine olefin amino acid connected by an all-carbon crosslinker comprising one double bond
  C-term NH2
QSQQTFANLWRLLAQD

SEQ ID NO: 849 - protein, 15 aa, Artificial Sequence
  Description of Artificial Sequence: Synthetic peptide
  N-term Ac
  MOD_RES (7)..(7): Alpha-Me R8-octenyl-alanine olefin amino acid connected by an all-carbon crosslinker comprising one double bond
  misc_feature (7)..(14): Crosslink between residues
  MOD_RES (14)..(14): Alpha-Me S5-pentenyl-alanine olefin amino acid connected by an all-carbon crosslinker comprising one double bond
  C-term NH2
QSQQTFANLWRLLAS

SEQ ID NO: 850 - protein, 16 aa, Artificial Sequence
  Description of Artificial Sequence: Synthetic peptide
  N-term Ac
  MOD_RES (7)..(7): Alpha-Me R8-octenyl-alanine olefin amino acid connected by an all-carbon crosslinker comprising one double bond
  misc_feature (7)..(14): Crosslink between residues
  MOD_RES (14)..(14): Alpha-Me S5-pentenyl-alanine olefin amino acid connected by an all-carbon crosslinker comprising one double bond
  C-term NH2
ESQQTFANLWRLLAQN

SEQ ID NO: 851 - protein, 12 aa, Artificial Sequence
  Description of Artificial Sequence: Synthetic peptide
  N-term Ac
  MOD_RES (4)..(4): Alpha-Me R8-octenyl-alanine olefin amino acid connected by an all-carbon crosslinker comprising one double bond
  misc_feature (4)..(11): Crosslink between residues
  MOD_RES (9)..(9): Norleucine
  MOD_RES (11)..(11): Alpha-Me S5-pentenyl-alanine olefin amino acid connected by an all-carbon crosslinker comprising one double bond
  C-term NH2
LTFANLWRLLAQ

SEQ ID NO: 852 - protein, 12 aa, Artificial Sequence
  Description of Artificial Sequence: Synthetic peptide
  N-term Ac
  MOD_RES (4)..(4): Alpha-Me R8-octenyl-alanine olefin amino acid connected by an all-carbon crosslinker comprising one double bond
  misc_feature (4)..(11): Crosslink between residues
  MOD_RES (9)..(9): Norleucine
  MOD_RES (11)..(11): Alpha-Me S5-pentenyl-alanine olefin amino acid connected by an all-carbon crosslinker comprising one double bond
  C-term NH2
LRFANLWRLLAQ

SEQ ID NO: 853 - protein, 16 aa, Artificial Sequence
  Description of Artificial Sequence: Synthetic peptide
  N-term Ac
  MOD_RES (7)..(7): Alpha-Me R8-octenyl-alanine olefin amino acid connected by an all-carbon crosslinker comprising one double bond
  misc_feature (7)..(14): Crosslink between residues
  MOD_RES (12)..(12): Norleucine
  MOD_RES (14)..(14): Alpha-Me S5-pentenyl-alanine olefin amino acid connected by an all-carbon crosslinker comprising one double bond
  C-term NH2
QSQQTFANWWRLLAQN

SEQ ID NO: 854 - protein, 15 aa, Artificial Sequence
  Description of Artificial Sequence: Synthetic peptide
  N-term Ac
  MOD_RES (7)..(7): Alpha-Me R8-octenyl-alanine olefin amino acid connected by an all-carbon crosslinker comprising one double bond
  misc_feature (7)..(14): Crosslink between residues
  MOD_RES (12)..(12): Norleucine
  MOD_RES (14)..(14): Alpha-Me S5-pentenyl-alanine olefin amino acid connected by an all-carbon crosslinker comprising one double bond
  C-term NH2
QSQQTFANLWRLLAQ

SEQ ID NO: 855 - protein, 13 aa, Artificial Sequence
  Description of Artificial Sequence: Synthetic peptide
  N-term Ac
  MOD_RES (4)..(4): Alpha-Me R8-octenyl-alanine olefin amino acid connected by an all-carbon crosslinker comprising one double bond
  misc_feature (4)..(11): Crosslink between residues
  MOD_RES (9)..(9): Norleucine
  MOD_RES (11)..(11): Alpha-Me S5-pentenyl-alanine olefin amino acid connected by an all-carbon crosslinker comprising one double bond
  C-term NH2
QTFANLWRLLAQN

SEQ ID NO: 856 - protein, 14 aa, Artificial Sequence
  Description of Artificial Sequence: Synthetic peptide
  N-term Ac
  MOD_RES (1)..(1): Norleucine
  MOD_RES (5)..(5): Alpha-Me R8-octenyl-alanine olefin amino acid connected by an all-carbon crosslinker comprising one double bond
  misc_feature (5)..(12): Crosslink between residues
  MOD_RES (12)..(12): Alpha-Me S5-pentenyl-alanine olefin amino acid connected by an all-carbon crosslinker comprising one double bond
  C-term NH2
LPRFANWWRLLAQN

SEQ ID NO: 857 - protein, 13 aa, Artificial Sequence
  Description of Artificial Sequence: Synthetic peptide
  N-term Ac
  MOD_RES (1)..(1): Norleucine
  MOD_RES (5)..(5): Alpha-Me R8-octenyl-alanine olefin amino acid connected by an all-carbon crosslinker comprising one double bond
  misc_feature (5)..(12): Crosslink between residues
  MOD_RES (12)..(12): Alpha-Me S5-pentenyl-alanine olefin amino acid connected by an all-carbon crosslinker comprising one double bond
  C-term NH2
LPRFANWWRLLAA

SEQ ID NO: 858 - protein, 10 aa, Artificial Sequence
  Description of Artificial Sequence: Synthetic peptide
  N-term Ac
  C-term NH2
TSFAEYWNLL

SEQ ID NO: 859 - protein, 12 aa, Artificial Sequence
  Description of Artificial Sequence: Synthetic peptide
  N-term Ac
  MOD_RES (4)..(4): Alpha-Me R8-octenyl-alanine olefin amino acid connected by an all-carbon crosslinker comprising one double bond
  misc_feature (4)..(11): Crosslink between residues
  MOD_RES (11)..(11): Alpha-Me S5-pentenyl-alanine olefin amino acid connected by an all-carbon crosslinker comprising one double bond
  C-term NH2
QTFAHWWSQLAS

SEQ ID NO: 860 - protein, 8 aa, Artificial Sequence
  Description of Artificial Sequence: Synthetic peptide
  N-term Ac
  MOD_RES (3)..(3): Alpha-Me S5-pentenyl-alanine olefin amino acid connected by an all-carbon crosslinker comprising one double bond
  misc_feature (3)..(7): Crosslink between residues
  MOD_RES (7)..(7): Alpha-Me S5-pentenyl-alanine olefin amino acid connected by an all-carbon crosslinker comprising one double bond
  C-term NH2
FMAYWEAL

SEQ ID NO: 861 - protein, 12 aa, Artificial Sequence
  Description of Artificial Sequence: Synthetic peptide
  N-term Ac
  C-term NH2
QTFEHWWSQLLS

SEQ ID NO: 862 - protein, 16 aa, Artificial Sequence
  Description of Artificial Sequence: Synthetic peptide
  N-term Ac
  MOD_RES (7)..(7): Alpha-Me R8-octenyl-alanine olefin amino acid connected by an all-carbon crosslinker comprising one double bond
  misc_feature (7)..(14): Crosslink between residues
  MOD_RES (10)..(10): Alpha-Me-Trp
  MOD_RES (13)..(13): Norleucine
  MOD_RES (14)..(14): Alpha-Me S5-pentenyl-alanine olefin amino acid connected by an all-carbon crosslinker comprising one double bond
  C-term NH2
QSQQTFANLWRLLAQN

SEQ ID NO: 863 - protein, 8 aa, Artificial Sequence
  Description of Artificial Sequence: Synthetic peptide
  N-term Ac
  MOD_RES (3)..(3): 2-aminoisobutyric acid
  MOD_RES (5)..(5): 6cl-Trp
  MOD_RES (7)..(7): Ac3c
  C-term NH2
FMXYWEXL

SEQ ID NO: 864 - protein, 8 aa, Artificial Sequence
  Description of Artificial Sequence: Synthetic peptide
  N-term Ac
  MOD_RES (2)..(2): Norleucine
  MOD_RES (3)..(3): Alpha-Me S5-pentenyl-alanine olefin amino acid connected by an all-carbon crosslinker comprising one double bond
  misc_feature (3)..(7): Crosslink between residues
  MOD_RES (5)..(5): 6cl-Trp
  MOD_RES (7)..(7): Alpha-Me S5-pentenyl-alanine olefin amino acid connected by an all-carbon crosslinker comprising one double bond
  C-term NH2
FLAYWEAL

SEQ ID NO: 865 - protein, 9 aa, Artificial Sequence
  Description of Artificial Sequence: Synthetic peptide
  N-term Ac
  MOD_RES (2)..(2): Alpha-Me R8-octenyl-alanine olefin amino acid connected by an all-carbon crosslinker comprising one Z configured double bond
  misc_feature (2)..(9): Crosslink between residues
  MOD_RES (5)..(5): 6cl-Trp
  MOD_RES (7)..(7): Ac3c
  MOD_RES (9)..(9): Alpha-Me S5-pentenyl-alanine olefin amino acid connected by an all-carbon crosslinker comprising one Z configured double bond
  C-term NH2
FAAYWEXLA

SEQ ID NO: 866 - protein, 10 aa, Artificial Sequence
  Description of Artificial Sequence: Synthetic peptide
  N-term Ac
  MOD_RES (2)..(2): Alpha-Me R8-octenyl-alanine olefin amino acid connected by an all-carbon crosslinker comprising one double bond
  misc_feature (2)..(9): Crosslink between residues
  MOD_RES (5)..(5): 6cl-Trp
  MOD_RES (7)..(7): Ac3c
  MOD_RES (9)..(9): Alpha-Me S5-pentenyl-alanine olefin amino acid connected by an all-carbon crosslinker comprising one double bond
  C-term NH2
FAAYWEXLAA

SEQ ID NO: 867 - protein, 14 aa, Artificial Sequence
  Description of Artificial Sequence: Synthetic peptide
  N-term Ac
  MOD_RES (1)..(1): Norleucine
  MOD_RES (5)..(5): Alpha-Me R8-octenyl-alanine olefin amino acid connected by an all-carbon crosslinker comprising one double bond
  misc_feature (5)..(12): Crosslink between residues
  MOD_RES (8)..(8): 6cl-Trp
  MOD_RES (12)..(12): Alpha-Me S5-pentenyl-alanine olefin amino acid connected by an all-carbon crosslinker comprising one double bond
  C-term NH2
LPRFANYWRLLAQN

SEQ ID NO: 868 - protein, 11 aa, Artificial Sequence
  Description of Artificial Sequence: Synthetic peptide
  N-term Ac
  MOD_RES (3)..(3): Alpha-Me R8-octenyl-alanine olefin amino acid connected by an all-carbon crosslinker comprising one double bond
  misc_feature (3)..(10): Crosslink between residues
  MOD_RES (10)..(10): Alpha-Me S5-pentenyl-alanine olefin amino acid connected by an all-carbon crosslinker comprising one double bond
  C-term NH2
AFAAAWALAAA

SEQ ID NO: 869 - protein, 11 aa, Artificial Sequence
  Description of Artificial Sequence: Synthetic peptide
  MOD_RES (3)..(3): Alpha-Me R8-octenyl-alanine olefin amino acid connected by an all-carbon crosslinker comprising one double bond
  misc_feature (3)..(10): Crosslink between residues
  MOD_RES (10)..(10): Alpha-Me S5-pentenyl-alanine olefin amino acid connected by an all-carbon crosslinker comprising one double bond
  C-term NH2
TFAAAWRLAAQ

SEQ ID NO: 870 - protein, 11 aa, Artificial Sequence
  Description of Artificial Sequence: Synthetic peptide
  N-term Pr
  MOD_RES (3)..(3): Alpha-Me R8-octenyl-alanine olefin amino acid connected by an all-carbon crosslinker comprising one double bond
  misc_feature (3)..(10): Crosslink between residues
  MOD_RES (10)..(10): Alpha-Me S5-pentenyl-alanine olefin amino acid connected by an all-carbon crosslinker comprising one double bond
  C-term NH2
TFAAAWRLAAQ

SEQ ID NO: 871 - protein, 16 aa, Artificial Sequence
  Description of Artificial Sequence: Synthetic peptide
  N-term Ac
  MOD_RES (7)..(7): Alpha-Me R8-octenyl-alanine olefin amino acid connected by an all-carbon crosslinker comprising no double bonds
  misc_feature (7)..(14): Crosslink between residues
  MOD_RES (12)..(12): Norleucine
  MOD_RES (14)..(14): Alpha-Me S5-pentenyl-alanine olefin amino acid connected by an all-carbon crosslinker comprising no double bonds
  C-term NH2
QSQQTFANLWRLLAQN

SEQ ID NO: 872 - protein, 13 aa, Artificial Sequence
  Description of Artificial Sequence: Synthetic peptide
  N-term Ac
  MOD_RES (4)..(4): Alpha-Me R8-octenyl-alanine olefin amino acid connected by an all-carbon crosslinker comprising no double bonds
  misc_feature (4)..(11): Crosslink between residues
  MOD_RES (11)..(11): Alpha-Me S5-pentenyl-alanine olefin amino acid connected by an all-carbon crosslinker comprising no double bonds
  C-term NH2
LTFAHYWAQLASA

SEQ ID NO: 873 - protein, 14 aa, Artificial Sequence
  Description of Artificial Sequence: Synthetic peptide
  N-term Ac
  MOD_RES (1)..(1): Norleucine
  MOD_RES (5)..(5): Alpha-Me R8-octenyl-alanine olefin amino acid connected by an all-carbon crosslinker comprising no double bonds
  misc_feature (5)..(12): Crosslink between residues
  MOD_RES (12)..(12): Alpha-Me S5-pentenyl-alanine olefin amino acid connected by an all-carbon crosslinker comprising no double bonds
  C-term NH2
LPRFANYWRLLAQN

SEQ ID NO: 874 - protein, 14 aa, Artificial Sequence
  Description of Artificial Sequence: Synthetic peptide
  N-term Ac
  MOD_RES (1)..(1): Norleucine
  MOD_RES (5)..(5): Alpha-Me R8-octenyl-alanine olefin amino acid connected by an all-carbon crosslinker comprising no double bonds
  misc_feature (5)..(12): Crosslink between residues
  MOD_RES (8)..(8): 6cl-Trp
  MOD_RES (12)..(12): Alpha-Me S5-pentenyl-alanine olefin amino acid connected by an all-carbon crosslinker comprising no double bonds
  C-term NH2
LPRFANYWRLLAQN

SEQ ID NO: 875 - protein, 12 aa, Artificial Sequence
  Description of Artificial Sequence: Synthetic peptide
  N-term Ac
  MOD_RES (4)..(4): Alpha-Me R8-octenyl-alanine olefin amino acid connected by an all-carbon crosslinker comprising no double bonds
  misc_feature (4)..(11): Crosslink between residues
  MOD_RES (7)..(7): 6cl-Trp
  MOD_RES (11)..(11): Alpha-Me S5-pentenyl-alanine olefin amino acid connected by an all-carbon crosslinker comprising no double bonds
  C-term NH2
LTFAHYWAQLAS

SEQ ID NO: 876 - protein, 16 aa, Artificial Sequence
  Description of Artificial Sequence: Synthetic peptide
  N-term Ac
  MOD_RES (3)..(3): Alpha-Me S5-pentenyl-alanine olefin amino acid connected by an all-carbon crosslinker comprising no double bonds
  misc_feature (3)..(7): Crosslink between residues
  MOD_RES (7)..(7): Amino acid comprising two pentenyl-alanine olefin side chains, each of which is crosslinked to another amino acid as indicated via fully saturated hydrocarbon crosslinks
  misc_feature (7)..(14): Crosslink between residues
  MOD_RES (14)..(14): Alpha-Me R8-octenyl-alanine olefin amino acid connected by an all carbon crosslinker comprising no double bonds
  C-term NH2
QSAQTFANLWRLLAQN

SEQ ID NO: 877 - protein, 12 aa, Artificial Sequence
  Description of Artificial Sequence: Synthetic peptide
  N-term Ac
  MOD_RES (4)..(4): Alpha-Me R8-octenyl-alanine olefin amino acid connected by an all-carbon crosslinker comprising no double bonds
  misc_feature (4)..(11): Crosslink between residues
  MOD_RES (7)..(7): 6cl-Trp
  MOD_RES (11)..(11): Alpha-Me S5-pentenyl-alanine olefin amino acid connected by an all-carbon crosslinker comprising no double bonds
  C-term NH2
LTFAHYWRQLAS

SEQ ID NO: 878 - protein, 16 aa, Artificial Sequence
  Description of Artificial Sequence: Synthetic peptide
  N-term Ac
  MOD_RES (7)..(7): Alpha-Me R8-octenyl-alanine olefin amino acid connected by an all-carbon crosslinker comprising no double bonds
  misc_feature (7)..(14): Crosslink between residues
  MOD_RES (10)..(10): 6cl-Trp
  MOD_RES (14)..(14): Alpha-Me S5-pentenyl-alanine olefin amino acid connected by an all-carbon crosslinker comprising no double bonds
  C-term NH2
QSQQTFANLWRLLAQN

SEQ ID NO: 879 - protein, 16 aa, Artificial Sequence
  Description of Artificial Sequence: Synthetic peptide
  N-term Ac
  MOD_RES (1)..(1): Alpha-Me R8-octenyl-alanine olefin amino acid connected by an all-carbon crosslinker comprising no double bonds
  misc_feature (1)..(8): Crosslink between residues
  MOD_RES (8)..(8): Alpha-Me S5-pentenyl-alanine olefin amino acid connected by an all-carbon crosslinker comprising no double bonds
  MOD_RES (14)..(14): 2-aminoisobutyric acid
  C-term NH2
ASQQTFSALWRLLXQN

SEQ ID NO: 880 - protein, 12 aa, Artificial Sequence
  Description of Artificial Sequence: Synthetic peptide
  N-term Ac
  MOD_RES (4)..(4): Alpha-Me R8-octenyl-alanine olefin amino acid connected by an all-carbon crosslinker comprising no double bonds
  misc_feature (4)..(11): Crosslink between residues
  MOD_RES (11)..(11): Alpha-Me S5-pentenyl-alanine olefin amino acid connected by an all-carbon crosslinker comprising no double bonds
  C-term NH2
LTFAHYWAQLAS

SEQ ID NO: 881 - protein, 12 aa, Artificial Sequence
  Description of Artificial Sequence: Synthetic peptide
  N-term Ac
  MOD_RES (4)..(4): Alpha-Me R8-octenyl-alanine olefin amino acid connected by an all-carbon crosslinker comprising no double bonds
  misc_feature (4)..(11): Crosslink between residues
  MOD_RES (11)..(11): Alpha-Me S5-pentenyl-alanine olefin amino acid connected by an all-carbon crosslinker comprising no double bonds
  C-term NH2
TSFAQYWNLLAP

SEQ ID NO: 882 - protein, 12 aa, Artificial Sequence
  Description of Artificial Sequence: Synthetic peptide
  N-term Ac
  C-term NH2
LTFEHYWAQLTS

SEQ ID NO: 883 - protein, 9 aa, Artificial Sequence
  Description of Artificial Sequence: Synthetic peptide
  N-term Ac
  MOD_RES (2)..(2): Alpha-Me R8-octenyl-alanine olefin amino acid connected by an all-carbon crosslinker comprising one E configured double bond
  misc_feature (2)..(9): Crosslink between residues
  MOD_RES (5)..(5): 6cl-Trp
  MOD_RES (7)..(7): Ac3c
  MOD_RES (9)..(9): Alpha-Me S5-pentenyl-alanine olefin amino acid connected by an all-carbon crosslinker comprising one E configured double bond
  C-term NH2
FAAYWEXLA

SEQ ID NO: 884 - protein, 11 aa, Artificial Sequence
  Description of Artificial Sequence: Synthetic peptide
  N-term Ac
  MOD_RES (3)..(3): Alpha-Me R8-octenyl-alanine olefin amino acid connected by an all-carbon crosslinker comprising one double bond
  misc_feature (3)..(10): Crosslink between residues
  MOD_RES (10)..(10): Alpha-Me S5-pentenyl-alanine olefin amino acid connected by an all-carbon crosslinker comprising one double bond
  C-term NH2
AFAAAWALAAA

SEQ ID NO: 885 - protein, 11 aa, Artificial Sequence
  Description of Artificial Sequence: Synthetic peptide
  N-term Ac
  MOD_RES (3)..(3): Alpha-Me R8-octenyl-alanine olefin amino acid connected by an all-carbon crosslinker comprising one double bond
  misc_feature (3)..(10): Crosslink between residues
  MOD_RES (10)..(10): Alpha-Me S5-pentenyl-alanine olefin amino acid connected by an all-carbon crosslinker comprising one double bond
  C-term NH2
TFAAAWRLAAQ

SEQ ID NO: 886 - protein, 11 aa, Artificial Sequence
  Description of Artificial Sequence: Synthetic peptide
  N-term Pr
  MOD_RES (3)..(3): Alpha-Me R8-octenyl-alanine olefin amino acid connected by an all-carbon crosslinker comprising one double bond
  misc_feature (3)..(10): Crosslink between residues
  MOD_RES (10)..(10): Alpha-Me S5-pentenyl-alanine olefin amino acid connected by an all-carbon crosslinker comprising one double bond
  C-term NH2
TFAAAWRLAAQ

SEQ ID NO: 887 - protein, 12 aa, Artificial Sequence
  Description of Artificial Sequence: Synthetic peptide
  N-term Ac
  MOD_RES (4)..(4): Alpha-Me R8-octenyl-alanine olefin amino acid connected by an all-carbon crosslinker comprising one E configured double bond
  misc_feature (4)..(11): Crosslink between residues
  MOD_RES (11)..(11): Alpha-Me S5-pentenyl-alanine olefin amino acid connected by an all-carbon crosslinker comprising one E configured double bond
  C-term NH2
LTFAHYWAQLAS

SEQ ID NO: 888 - protein, 23 aa, Artificial Sequence
  Description of Artificial Sequence: Synthetic peptide
  N-term Ac
  MOD_RES (7)..(7): Beta-Ala
  MOD_RES (14)..(14): Alpha-Me R8-octenyl-alanine olefin amino acid connected by an all-carbon crosslinker comprising one double bond
  misc_feature (14)..(21): Crosslink between residues
  MOD_RES (21)..(21): Alpha-Me S5-pentenyl-alanine olefin amino acid connected by an all-carbon crosslinker comprising one double bond
  C-term NH2
CCPGCCAQSQQTFANLWRLLAQN

SEQ ID NO: 889 - protein, 23 aa, Artificial Sequence
  Description of Artificial Sequence: Synthetic peptide
  N-term Ac
  MOD_RES (7)..(7): Beta-Ala
  MOD_RES (14)..(14): Alpha-Me R8-octenyl-alanine olefin amino acid connected by an all-carbon crosslinker comprising one double bond
  misc_feature (14)..(21): Crosslink between residues
  MOD_RES (21)..(21): Alpha-Me S5-pentenyl-alanine olefin amino acid connected by an all-carbon crosslinker comprising one double bond
  C-term NH2
CCPGCCAQSQQTAANLWRLLAQN

SEQ ID NO: 890 - protein, 21 aa, Artificial Sequence
  Description of Artificial Sequence: Synthetic peptide
  N-term Ac
  MOD_RES (7)..(7): Beta-Ala
  MOD_RES (8)..(8): Norleucine
  MOD_RES (12)..(12): Alpha-Me R8-octenyl-alanine olefin amino acid connected by an all-carbon crosslinker comprising one double bond
  misc_feature (12)..(19): Crosslink between residues
  MOD_RES (19)..(19): Alpha-Me S5-pentenyl-alanine olefin amino acid connected by an all-carbon crosslinker comprising one double bond
  C-term NH2
CCPGCCALPRFANYWRLLAQN

SEQ ID NO: 891 - protein, 12 aa, Artificial Sequence
  Description of Artificial Sequence: Synthetic peptide
  N-term Ac
  MOD_RES (4)..(4): Alpha-Me R8-octenyl-alanine olefin amino acid that is not connected by a crosslinker
  MOD_RES (11)..(11): Alpha-Me S5-pentenyl-alanine olefin amino acid that is not connected by a crosslinker
  C-term NH2
LTFAHYWAQLAS

SEQ ID NO: 892 - protein, 9 aa, Artificial Sequence
  Description of Artificial Sequence: Synthetic peptide
  N-term Ac
  MOD_RES (2)..(2): Alpha-Me R8-octenyl-alanine olefin amino acid connected by an all-carbon crosslinker comprising no double bonds
  misc_feature (2)..(9): Crosslink between residues
  MOD_RES (5)..(5): 6cl-Trp
  MOD_RES (7)..(7): Ac3c
  MOD_RES (9)..(9): Alpha-Me S5-pentenyl-alanine olefin amino acid connected by an all-carbon crosslinker comprising no double bonds
  C-term NH2
FAHYWRXLA

SEQ ID NO: 893 - protein, 12 aa, Artificial Sequence
  Description of Artificial Sequence: Synthetic peptide
  N-term Ac
  MOD_RES (4)..(4): Alpha-Me R8-octenyl-alanine olefin amino acid connected by an all-carbon crosslinker comprising no double bonds
  misc_feature (4)..(11): Crosslink between residues
  MOD_RES (11)..(11): Alpha-Me S5-pentenyl-alanine olefin amino acid connected by an all-carbon crosslinker comprising no double bonds
  C-term NH2
QTFAHWWSQLAS

SEQ ID NO: 894 - protein, 12 aa, Artificial Sequence
  Description of Artificial Sequence: Synthetic peptide
  N-term Ac
  MOD_RES (4)..(4): Alpha-Me R8-octenyl-alanine olefin amino acid connected by an all-carbon crosslinker comprising one double bond
  misc_feature (4)..(11): Crosslink between residues
  MOD_RES (11)..(11): Alpha-Me S5-pentenyl-alanine olefin amino acid connected by an all-carbon crosslinker comprising one double bond
  C-term NH2
LTAAHYWRQLAS

SEQ ID NO: 895 - protein, 16 aa, Artificial Sequence
  Description of Artificial Sequence: Synthetic peptide
  N-term Ac
  MOD_RES (2)..(2): Alpha-Me R8-octenyl-alanine olefin amino acid connected by an all-carbon crosslinker comprising one double bond
  misc_feature (2)..(9): Crosslink between residues
  MOD_RES (9)..(9): Alpha-Me S5-pentenyl-alanine olefin amino acid connected by an all-carbon crosslinker comprising one double bond
  MOD_RES (14)..(14): 2-aminoisobutyric acid
  C-term NH2
QAQQTFSNAWRLLXQN

SEQ ID NO: 896 - protein, 16 aa, Artificial Sequence
  Description of Artificial Sequence: Synthetic peptide
  N-term Ac
  MOD_RES (5)..(5): Alpha-Me R8-octenyl-alanine olefin amino acid connected by an all-carbon crosslinker comprising one double bond
  misc_feature (5)..(12): Crosslink between residues
  MOD_RES (12)..(12): Alpha-Me S5-pentenyl-alanine olefin amino acid connected by an all-carbon crosslinker comprising one double bond
  MOD_RES (14)..(14): 2-aminoisobutyric acid
  C-term NH2
QSQQAFSNLWRALXQN

SEQ ID NO: 897 - protein, 10 aa, Artificial Sequence
  Description of Artificial Sequence: Synthetic peptide
  N-term Ac
  MOD_RES (2)..(2): Alpha-Me R8-octenyl-alanine olefin amino acid connected by an all-carbon crosslinker comprising one double bond
  misc_feature (2)..(9): Crosslink between residues
  MOD_RES (7)..(7): Ac3c
  MOD_RES (9)..(9): Alpha-Me S5-pentenyl-alanine olefin amino acid connected by an all-carbon crosslinker comprising one double bond
  C-term NH2
FAAYWEXLAA

SEQ ID NO: 898 - protein, 10 aa, Artificial Sequence
  Description of Artificial Sequence: Synthetic peptide
  N-term Ac
  MOD_RES (2)..(2): Alpha-Me R8-octenyl-alanine olefin amino acid connected by an all-carbon crosslinker comprising one double bond
  misc_feature (2)..(9): Crosslink between residues
  MOD_RES (7)..(7): Ac3c
  MOD_RES (9)..(9): Alpha-Me S5-pentenyl-alanine olefin amino acid connected by an all-carbon crosslinker comprising one double bond
  C-term NH2
FAAYWEXLAS

SEQ ID NO: 899 - protein, 10 aa, Artificial Sequence
  Description of Artificial Sequence: Synthetic peptide
  N-term Ac
  MOD_RES (2)..(2): Alpha-Me R8-octenyl-alanine olefin amino acid connected by an all-carbon crosslinker comprising one double bond
  misc_feature (2)..(9): Crosslink between residues
  MOD_RES (7)..(7): Ac3c
  MOD_RES (9)..(9): Alpha-Me S5-pentenyl-alanine olefin amino acid connected by an all-carbon crosslinker comprising one double bond
  C-term NH2
FAAYWEXLAQ

SEQ ID NO: 900 - protein, 10 aa, Artificial Sequence
  Description of Artificial Sequence: Synthetic peptide
  N-term Ac
  MOD_RES (2)..(2): Alpha-Me R8-octenyl-alanine olefin amino acid connected by an all-carbon crosslinker comprising one double bond
  misc_feature (2)..(9): Crosslink between residues
  MOD_RES (7)..(7): 2-aminoisobutyric acid
  MOD_RES (9)..(9): Alpha-Me S5-pentenyl-alanine olefin amino acid connected by an all-carbon crosslinker comprising one double bond
  C-term NH2
FAAYWEXLAS

SEQ ID NO: 901 - protein, 10 aa, Artificial Sequence
  Description of Artificial Sequence: Synthetic peptide
  N-term Ac
  MOD_RES (2)..(2): Alpha-Me R8-octenyl-alanine olefin amino acid connected by an all-carbon crosslinker comprising one double bond
  misc_feature (2)..(9): Crosslink between residues
  MOD_RES (9)..(9): Alpha-Me S5-pentenyl-alanine olefin amino acid connected by an all-carbon crosslinker comprising one double bond
  C-term NH2
FAAYWEALAS

SEQ ID NO: 902 - protein, 10 aa, Artificial Sequence
  Description of Artificial Sequence: Synthetic peptide
  N-term Ac
  MOD_RES (2)..(2): Alpha-Me R8-octenyl-alanine olefin amino acid connected by an all-carbon crosslinker comprising one double bond
  misc_feature (2)..(9): Crosslink between residues
  MOD_RES (9)..(9): Alpha-Me S5-pentenyl-alanine olefin amino acid connected by an all-carbon crosslinker comprising one double bond
  C-term NH2
FAAYWEQLAS

SEQ ID NO: 903 - protein, 10 aa, Artificial Sequence
  Description of Artificial Sequence: Synthetic peptide
  N-term Ac
  MOD_RES (2)..(2): Alpha-Me R8-octenyl-alanine olefin amino acid connected by an all-carbon crosslinker comprising one double bond
  misc_feature (2)..(9): Crosslink between residues
  MOD_RES (9)..(9): Alpha-Me S5-pentenyl-alanine olefin amino acid connected by an all-carbon crosslinker comprising one double bond
  C-term NH2
FAHYWEQLAS

SEQ ID NO: 904 - protein, 10 aa, Artificial Sequence
  Description of Artificial Sequence: Synthetic peptide
  N-term Ac
  MOD_RES (2)..(2): Alpha-Me R8-octenyl-alanine olefin amino acid connected by an all-carbon crosslinker comprising one double bond
  misc_feature (2)..(9): Crosslink between residues
  MOD_RES (9)..(9): Alpha-Me S5-pentenyl-alanine olefin amino acid connected by an all-carbon crosslinker comprising one double bond
  C-term NH2
FAHYWAQLAS

SEQ ID NO: 905 - protein, 10 aa, Artificial Sequence
  Description of Artificial Sequence: Synthetic peptide
  N-term Ac
  MOD_RES (2)..(2): Alpha-Me R8-octenyl-alanine olefin amino acid connected by an all-carbon crosslinker comprising one double bond
  misc_feature (2)..(9): Crosslink between residues
  MOD_RES (7)..(7): Ac3c
  MOD_RES (9)..(9): Alpha-Me S5-pentenyl-alanine olefin amino acid connected by an all-carbon crosslinker comprising one double bond
  C-term NH2
FAHYWAXLAS

SEQ ID NO: 906 - protein, 10 aa, Artificial Sequence
  Description of Artificial Sequence: Synthetic peptide
  N-term Ac
  MOD_RES (2)..(2): Alpha-Me R8-octenyl-alanine olefin amino acid connected by an all-carbon crosslinker comprising one double bond
  misc_feature (2)..(9): Crosslink between residues
  MOD_RES (7)..(7): Ac3c
  MOD_RES (9)..(9): Alpha-Me S5-pentenyl-alanine olefin amino acid connected by an all-carbon crosslinker comprising one double bond
  C-term NH2
FAHYWRXLAS

SEQ ID NO: 907 - protein, 10 aa, Artificial Sequence
  Description of Artificial Sequence: Synthetic peptide
  N-term Ac
  MOD_RES (2)..(2): Alpha-Me R8-octenyl-alanine olefin amino acid connected by an all-carbon crosslinker comprising one double bond
  misc_feature (2)..(9): Crosslink between residues
  MOD_RES (7)..(7): Ac3c
  MOD_RES (9)..(9): Alpha-hydrogen S5-pentenyl-alanine olefin amino acid connected by an all-carbon crosslinker comprising one double bond
  C-term NH2
FAAYWEXLAA

SEQ ID NO: 908 - protein, 14 aa, Artificial Sequence
  Description of Artificial Sequence: Synthetic peptide
  N-term Ac
  MOD_RES (1)..(1): Norleucine
  MOD_RES (5)..(5): Alpha-Me R8-octenyl-alanine olefin amino acid connected by an all-carbon crosslinker comprising no double bonds
  misc_feature (5)..(3): Crosslink between residues
  MOD_RES (12)..(12): Alpha-Me S5-pentenyl-alanine olefin amino acid connected by an all-carbon crosslinker comprising no double bonds
  C-term NH2
LPTFANYWRLLAQN

SEQ ID NO: 909 - protein, 11 aa, Artificial Sequence
  Description of Artificial Sequence: Synthetic peptide
  N-term Ac
  MOD_RES (3)..(3): Alpha-Me R8-octenyl-alanine olefin amino acid connected by an all-carbon crosslinker comprising one double bond
  misc_feature (3)..(10): Crosslink between residues
  MOD_RES (10)..(10): Alpha-Me S5-pentenyl-alanine olefin amino acid connected by an all-carbon crosslinker comprising one double bond
  C-term NH2
TFAAAWRALAQ

SEQ ID NO: 910 - protein, 12 aa, Artificial Sequence
  Description of Artificial Sequence: Synthetic peptide
  N-term Ac
  MOD_RES (4)..(4): Alpha-Me R8-octenyl-alanine olefin amino acid connected by an all-carbon crosslinker comprising no double bonds
  misc_feature (4)..(11): Crosslink between residues
  MOD_RES (11)..(11): Alpha-Me S5-pentenyl-alanine olefin amino acid connected by an all-carbon crosslinker comprising no double bonds
  C-term NH2
TSFAHYWAQLAS

SEQ ID NO: 911 - protein, 10 aa, Artificial Sequence
  Description of Artificial Sequence: Synthetic peptide
  N-term Ac
  MOD_RES (2)..(2): Alpha-Me R8-octenyl-alanine olefin amino acid connected by an all-carbon crosslinker comprising no double bonds
  misc_feature (2)..(9): Crosslink between residues
  MOD_RES (5)..(5): 6cl-Trp
  MOD_RES (7)..(7): Ac3c
  MOD_RES (9)..(9): Alpha-Me S5-pentenyl-alanine olefin amino acid connected by an all-carbon crosslinker comprising no double bonds
  C-term NH2
FAAYWEXLAA

SEQ ID NO: 912 - protein, 12 aa, Artificial Sequence
  Description of Artificial Sequence: Synthetic peptide
  N-term Ac
  MOD_RES (4)..(4): Alpha-Me R8-octenyl-alanine olefin amino acid connected by an all-carbon crosslinker comprising one double bond
  misc_feature (4)..(11): Crosslink between residues
  MOD_RES (11)..(11): Alpha-Me S5-pentenyl-alanine olefin amino acid connected by an all-carbon crosslinker comprising one double bond
  C-term NH2
LTFAHYWAQIAS

SEQ ID NO: 913 - protein, 12 aa, Artificial Sequence
  Description of Artificial Sequence: Synthetic peptide
  N-term Ac
  MOD_RES (4)..(4): Alpha-Me R8-octenyl-alanine olefin amino acid connected by an all-carbon crosslinker comprising one double bond
  misc_feature (4)..(11): Crosslink between residues
  MOD_RES (10)..(10): Norleucine
  MOD_RES (11)..(11): Alpha-Me S5-pentenyl-alanine olefin amino acid connected by an all-carbon crosslinker comprising one double bond
  C-term NH2
LTFAHYWAQLAS

SEQ ID NO: 914 - protein, 12 aa, Artificial Sequence
  Description of Artificial Sequence: Synthetic peptide
  N-term Ac
  MOD_RES (4)..(4): Alpha-Me R8-octenyl-alanine olefin amino acid connected by an all-carbon crosslinker comprising one double bond
  misc_feature (4)..(11): Crosslink between residues
  MOD_RES (11)..(11): Alpha-Me S5-pentenyl-alanine olefin amino acid connected by an all-carbon crosslinker comprising one double bond
  C-term NH2
LTFAHYWAQLAA

SEQ ID NO: 915 - protein, 12 aa, Artificial Sequence
  Description of Artificial Sequence: Synthetic peptide
  N-term Ac
  MOD_RES (4)..(4): Alpha-Me R8-octenyl-alanine olefin amino acid connected by an all-carbon crosslinker comprising one double bond
  misc_feature (4)..(11): Crosslink between residues
  MOD_RES (11)..(11): Alpha-Me S5-pentenyl-alanine olefin amino acid connected by an all-carbon crosslinker comprising one double bond
  MOD_RES (12)..(12): Abu
  C-term NH2
LTFAHYWAQLAX

SEQ ID NO: 916 - protein, 12 aa, Artificial Sequence
  Description of Artificial Sequence: Synthetic peptide
  N-term Ac
  MOD_RES (4)..(4): Alpha-Me R8-octenyl-alanine olefin amino acid connected by an all-carbon crosslinker comprising one double bond
  misc_feature (4)..(11): Crosslink between residues
  MOD_RES (8)..(8): Abu
  MOD_RES (11)..(11): Alpha-Me S5-pentenyl-alanine olefin amino acid connected by an all-carbon crosslinker comprising one double bond
  C-term NH2
LTFAHYWXQLAS

SEQ ID NO: 917 - protein, 12 aa, Artificial Sequence
  Description of Artificial Sequence: Synthetic peptide
  N-term Ac
  MOD_RES (4)..(4): Alpha-Me R8-octenyl-alanine olefin amino acid connected by an all-carbon crosslinker comprising one E configured double bond
  misc_feature (4)..(11): Crosslink between residues
  MOD_RES (11)..(11): Alpha-Me S5-pentenyl-alanine olefin amino acid connected by an all-carbon crosslinker comprising one E configured double bond
  C-term NH2
LTFAAYWAQLAS

SEQ ID NO: 918 - protein, 12 aa, Artificial Sequence
  Description of Artificial Sequence: Synthetic peptide
  N-term Ac
  MOD_RES (4)..(4): Alpha-Me R8-octenyl-alanine olefin amino acid connected by an all-carbon crosslinker comprising one double bond
  misc_feature (4)..(11): Crosslink between residues
  MOD_RES (11)..(11): Alpha-Me S5-pentenyl-alanine olefin amino acid connected by an all-carbon crosslinker comprising one double bond
  C-term NH2
LAFAHYWAQLAS

SEQ ID NO: 919 - protein, 12 aa, Artificial Sequence
  Description of Artificial Sequence: Synthetic peptide
  N-term Ac
  MOD_RES (4)..(4): Alpha-Me R8-octenyl-alanine olefin amino acid connected by an all-carbon crosslinker comprising one double bond
  misc_feature (4)..(11): Crosslink between residues
  MOD_RES (11)..(11): Alpha-Me S5-pentenyl-alanine olefin amino acid connected by an all-carbon crosslinker comprising one double bond
  C-term NH2
LAFAAYWAQLAS

SEQ ID NO: 920 - protein, 12 aa, Artificial Sequence
  Description of Artificial Sequence: Synthetic peptide
  N-term Ac
  MOD_RES (4)..(4): Alpha-Me R8-octenyl-alanine olefin amino acid connected by an all-carbon crosslinker comprising one E configured double bond
  misc_feature (4)..(11): Crosslink between residues
  MOD_RES (11)..(11): Alpha-Me S5-pentenyl-alanine olefin amino acid connected by an all-carbon crosslinker comprising one E configured double bond
  C-term NH2
LTFAAYWAQLAA

SEQ ID NO: 921 - protein, 12 aa, Artificial Sequence
  Description of Artificial Sequence: Synthetic peptide
  N-term Ac
  MOD_RES (4)..(4): Alpha-Me R8-octenyl-alanine olefin amino acid connected by an all-carbon crosslinker comprising one double bond
  misc_feature (4)..(11): Crosslink between residues
  MOD_RES (11)..(11): Alpha-Me S5-pentenyl-alanine olefin amino acid connected by an all-carbon crosslinker comprising one double bond
  C-term NH2
LAFAAYWAQLAA

SEQ ID NO: 922 - protein, 12 aa, Artificial Sequence
  Description of Artificial Sequence: Synthetic peptide
  N-term Ac
  MOD_RES (4)..(4): Alpha-Me R8-octenyl-alanine olefin amino acid connected by an all-carbon crosslinker comprising one double bond
  misc_feature (4)..(11): Crosslink between residues
  MOD_RES (9)..(9): Norleucine
  MOD_RES (11)..(11): Alpha-Me S5-pentenyl-alanine olefin amino acid connected by an all-carbon crosslinker comprising one double bond
  C-term NH2
LTFANLWALLAQ

SEQ ID NO: 923 - protein, 12 aa, Artificial Sequence
  Description of Artificial Sequence: Synthetic peptide
  N-term Ac
  MOD_RES (4)..(4): Alpha-Me R8-octenyl-alanine olefin amino acid connected by an all-carbon crosslinker comprising one double bond
  misc_feature (4)..(11): Crosslink between residues
  MOD_RES (9)..(9): Norleucine
  MOD_RES (11)..(11): Alpha-Me S5-pentenyl-alanine olefin amino acid connected by an all-carbon crosslinker comprising one double bond
  C-term NH2
LTFANLWALLAA

SEQ ID NO: 924 - protein, 12 aa, Artificial Sequence
  Description of Artificial Sequence: Synthetic peptide
  N-term Ac
  MOD_RES (4)..(4): Alpha-Me R8-octenyl-alanine olefin amino acid connected by an all-carbon crosslinker comprising one double bond
  misc_feature (4)..(11): Crosslink between residues
  MOD_RES (9)..(9): Norleucine
  MOD_RES (11)..(11): Alpha-Me S5-pentenyl-alanine olefin amino acid connected by an all-carbon crosslinker comprising one double bond
  C-term NH2
LTFAALWALLAQ

SEQ ID NO: 925 - protein, 12 aa, Artificial Sequence
  Description of Artificial Sequence: Synthetic peptide
  N-term Ac
  MOD_RES (4)..(4): Alpha-Me R8-octenyl-alanine olefin amino acid connected by an all-carbon crosslinker comprising one double bond
  misc_feature (4)..(11): Crosslink between residues
  MOD_RES (9)..(9): Norleucine
  MOD_RES (11)..(11): Alpha-Me S5-pentenyl-alanine olefin amino acid connected by an all-carbon crosslinker comprising one double bond
  C-term NH2
LAFANLWALLAQ

SEQ ID NO: 926 - protein, 12 aa, Artificial Sequence
  Description of Artificial Sequence: Synthetic peptide
  N-term Ac
  MOD_RES (4)..(4): Alpha-Me R8-octenyl-alanine olefin amino acid connected by an all-carbon crosslinker comprising one double bond
  misc_feature (4)..(11): Crosslink between residues
  MOD_RES (9)..(9): Norleucine
  MOD_RES (11)..(11): Alpha-Me S5-pentenyl-alanine olefin amino acid connected by an all-carbon crosslinker comprising one double bond
  C-term NH2
LAFAALWALLAA

SEQ ID NO: 927 - protein, 10 aa, Artificial Sequence
  Description of Artificial Sequence: Synthetic peptide
  N-term Ac
  MOD_RES (2)..(2): Alpha-Me R8-octenyl-alanine olefin amino acid connected by an all-carbon crosslinker comprising one double bond
  misc_feature (2)..(9): Crosslink between residues
  MOD_RES (7)..(7): Ac3c
  MOD_RES (9)..(9): Alpha-Me S5-pentenyl-alanine olefin amino acid connected by an all-carbon crosslinker comprising one double bond
  C-term NH2
AAAYWEXLAA

SEQ ID NO: 928 - protein, 11 aa, Artificial Sequence
  Description of Artificial Sequence: Synthetic peptide
  N-term Ac
  MOD_RES (2)..(2): Alpha-Me R8-octenyl-alanine olefin amino acid connected by an all-carbon crosslinker comprising one double bond
  misc_feature (2)..(9): Crosslink between residues
  MOD_RES (7)..(7): Ac3c
  MOD_RES (9)..(9): Alpha-Me S5-pentenyl-alanine olefin amino acid connected by an all-carbon crosslinker comprising one double bond
  C-term NH2
FAAYWEXLAAA

SEQ ID NO: 929 - protein, 10 aa, Artificial Sequence
  Description of Artificial Sequence: Synthetic peptide
  N-term Ac
  MOD_RES (2)..(2): Alpha-Me R8-octenyl-alanine olefin amino acid connected by an all-carbon crosslinker comprising one double bond
  misc_feature (2)..(9): Crosslink between residues
  MOD_RES (7)..(7): Ac3c
  MOD_RES (9)..(9): Alpha-Me S5-pentenyl-alanine olefin amino acid connected by an all-carbon crosslinker comprising one double bond
  MOD_RES (10)..(10): Abu
  C-term NH2
FAAYWEXLAX

SEQ ID NO: 930 - protein, 10 aa, Artificial Sequence
  Description of Artificial Sequence: Synthetic peptide
  N-term Ac
  MOD_RES (2)..(2): Alpha-Me R8-octenyl-alanine olefin amino acid connected by an all-carbon crosslinker comprising one double bond
  misc_feature (2)..(9): Crosslink between residues
  MOD_RES (7)..(7): Ac3c
  MOD_RES (9)..(9): Alpha-Me S5-pentenyl-alanine olefin amino acid connected by an all-carbon crosslinker comprising one double bond
  MOD_RES (10)..(10): Norleucine
  C-term NH2
FAAYWEXLAL

SEQ ID NO: 931 - protein, 10 aa, Artificial Sequence
  Description of Artificial Sequence: Synthetic peptide
  N-term Ac
  MOD_RES (2)..(2): Alpha-Me R5-pentenyl-alanine olefin amino acid connected by an all-carbon crosslinker comprising one double bond
  misc_feature (2)..(9): Crosslink between residues
  MOD_RES (7)..(7): Ac3c
  MOD_RES (9)..(9): Alpha-Me S8-octenyl-alanine olefin amino acid connected by an all-carbon crosslinker comprising one double bond
  C-term NH2
FAAYWEXLAA

SEQ ID NO: 932 - protein, 10 aa, Artificial Sequence
  Description of Artificial Sequence: Synthetic peptide
  N-term Ac
  MOD_RES (2)..(2): Alpha-Me S5-pentenyl-alanine olefin amino acid connected by an all-carbon crosslinker comprising one double bond
  misc_feature (2)..(9): Crosslink between residues
  MOD_RES (7)..(7): Ac3c
  MOD_RES (9)..(9): Alpha-Me R8-octenyl-alanine olefin amino acid connected by an all-carbon crosslinker comprising one double bond
  C-term NH2
FAAYWEXLAA

SEQ ID NO: 933 - protein, 10 aa, Artificial Sequence
  Description of Artificial Sequence: Synthetic peptide
  N-term Ac
  MOD_RES (2)..(2): Alpha-Me R8-octenyl-alanine olefin amino acid connected by an all-carbon crosslinker comprising one double bond
  misc_feature (2)..(9): Crosslink between residues
  MOD_RES (7)..(7): Ac3c
  MOD_RES (9)..(9): Alpha-Me S5-pentenyl-alanine olefin amino acid connected by an all-carbon crosslinker comprising one double bond
  C-term NH2
FAAYWEXIAA

SEQ ID NO: 934 - protein, 10 aa, Artificial Sequence
  Description of Artificial Sequence: Synthetic peptide
  N-term Ac
  MOD_RES (2)..(2): Alpha-Me R8-octenyl-alanine olefin amino acid connected by an all-carbon crosslinker comprising one double bond
  misc_feature (2)..(9): Crosslink between residues
  MOD_RES (7)..(7): Ac3c
  MOD_RES (8)..(8): Norleucine
  MOD_RES (9)..(9): Alpha-Me S5-pentenyl-alanine olefin amino acid connected by an all-carbon crosslinker comprising one double bond
  C-term NH2
FAAYWEXLAA

SEQ ID NO: 935 - protein, 10 aa, Artificial Sequence
  Description of Artificial Sequence: Synthetic peptide
  N-term Ac
  MOD_RES (2)..(2): Alpha-Me R8-octenyl-alanine olefin amino acid connected by an all-carbon crosslinker comprising one double bond
  misc_feature (2)..(9): Crosslink between residues
  MOD_RES (7)..(7): Alpha-Me-Leu
  MOD_RES (9)..(9): Alpha-Me S5-pentenyl-alanine olefin amino acid connected by an all-carbon crosslinker comprising one double bond
  C-term NH2
FAAYWELLAA

SEQ ID NO: 936 - protein, 10 aa, Artificial Sequence
  Description of Artificial Sequence: Synthetic peptide
  N-term Ac
  MOD_RES (2)..(2): Alpha-Me R8-octenyl-alanine olefin amino acid connected by an all-carbon crosslinker comprising one double bond
  misc_feature (2)..(9): Crosslink between residues
  MOD_RES (7)..(7): Norleucine
  MOD_RES (9)..(9): Alpha-Me S5-pentenyl-alanine olefin amino acid connected by an all-carbon crosslinker comprising one double bond
  C-term NH2
FAAYWELLAA

SEQ ID NO: 937 - protein, 10 aa, Artificial Sequence
  Description of Artificial Sequence: Synthetic peptide
  N-term Ac
  MOD_RES (2)..(2): Alpha-Me R8-octenyl-alanine olefin amino acid connected by an all-carbon crosslinker comprising one double bond
  misc_feature (2)..(9): Crosslink between residues
  MOD_RES (7)..(7): Ac3c
  MOD_RES (9)..(9): Alpha-Me S5-pentenyl-alanine olefin amino acid connected by an all-carbon crosslinker comprising one double bond
  C-term NH2
FAAYWQXLAA

SEQ ID NO: 938 - protein, 10 aa, Artificial Sequence
  Description of Artificial Sequence: Synthetic peptide
  N-term Ac
  MOD_RES (2)..(2): Alpha-Me R8-octenyl-alanine olefin amino acid connected by an all-carbon crosslinker comprising one double bond
  misc_feature (2)..(9): Crosslink between residues
  MOD_RES (7)..(7): Ac3c
  MOD_RES (9)..(9): Alpha-Me S5-pentenyl-alanine olefin amino acid connected by an all-carbon crosslinker comprising one double bond
  C-term NH2
FAAYWAXLAA

SEQ ID NO: 939 - protein, 10 aa, Artificial Sequence
  Description of Artificial Sequence: Synthetic peptide
  N-term Ac
  MOD_RES (2)..(2): Alpha-Me R8-octenyl-alanine olefin amino acid connected by an all-carbon crosslinker comprising one double bond
  misc_feature (2)..(9): Crosslink between residues
  MOD_RES (6)..(6): Abu
  MOD_RES (7)..(7): Ac3c
  MOD_RES (9)..(9): Alpha-Me S5-pentenyl-alanine olefin amino acid connected by an all-carbon crosslinker comprising one double bond
  C-term NH2
FAAYWXXLAA

SEQ ID NO: 940 - protein, 10 aa, Artificial Sequence
  Description of Artificial Sequence: Synthetic peptide
  N-term Ac
  MOD_RES (2)..(2): Alpha-Me R8-octenyl-alanine olefin amino acid connected by an all-carbon crosslinker comprising one double bond
  misc_feature (2)..(9): Crosslink between residues
  MOD_RES (6)..(6): Norleucine
  MOD_RES (7)..(7): Ac3c
  MOD_RES (9)..(9): Alpha-Me S5-pentenyl-alanine olefin amino acid connected by an all-carbon crosslinker comprising one double bond
  C-term NH2
FAAYWLXLAA

SEQ ID NO: 941 - protein, 10 aa, Artificial Sequence
  Description of Artificial Sequence: Synthetic peptide
  N-term Ac
  MOD_RES (2)..(2): Alpha-Me R8-octenyl-alanine olefin amino acid connected by an all-carbon crosslinker comprising one double bond
  misc_feature (2)..(9): Crosslink between residues
  MOD_RES (3)..(3): Abu
  MOD_RES (7)..(7): Ac3c
  MOD_RES (9)..(9): Alpha-Me S5-pentenyl-alanine olefin amino acid connected by an all-carbon crosslinker comprising one double bond
  C-term NH2
FAXYWEXLAA

SEQ ID NO: 942 - protein, 10 aa, Artificial Sequence
  Description of Artificial Sequence: Synthetic peptide
  N-term Ac
  MOD_RES (2)..(2): Alpha-Me R8-octenyl-alanine olefin amino acid connected by an all-carbon crosslinker comprising one double bond
  misc_feature (2)..(9): Crosslink between residues
  MOD_RES (3)..(3): Norleucine
  MOD_RES (7)..(7): Ac3c
  MOD_RES (9)..(9): Alpha-Me S5-pentenyl-alanine olefin amino acid connected by an all-carbon crosslinker comprising one double bond
  C-term NH2
FALYWEXLAA

SEQ ID NO: 943 - protein, 13 aa, Artificial Sequence
  Description of Artificial Sequence: Synthetic peptide
  N-term 5-FAM
  MOD_RES (1)..(1): Beta-Ala
  C-term NH2
ALTFEHYWAQLTS

SEQ ID NO: 944 - protein, 13 aa, Artificial Sequence
  Description of Artificial Sequence: Synthetic peptide
  N-term 5-FAM
  MOD_RES (1)..(1): Beta-Ala
  MOD_RES (5)..(5): Alpha-Me R8-octenyl-alanine olefin amino acid connected by an all-carbon crosslinker comprising no double bonds
  misc_feature (5)..(12): Crosslink between residues
  MOD_RES (12)..(12): Alpha-Me S5-pentenyl-alanine olefin amino acid connected by an all-carbon crosslinker comprising no double bonds
  C-term NH2
ALTFAHYWAQLAS

SEQ ID NO: 945 - protein, 12 aa, Artificial Sequence
  Description of Artificial Sequence: Synthetic peptide
  N-term Ac
  MOD_RES (4)..(4): Alpha-Me R8-octenyl-alanine olefin amino acid connected by an all-carbon crosslinker comprising one double bond
  misc_feature (4)..(11): Crosslink between residues
  MOD_RES (10)..(10): hLeu
  MOD_RES (11)..(11): Alpha-Me S5-pentenyl-alanine olefin amino acid connected by an all-carbon crosslinker comprising one double bond
  C-term NH2
LTFAHYWAQLAS

SEQ ID NO: 946 - protein, 12 aa, Artificial Sequence
  Description of Artificial Sequence: Synthetic peptide
  N-term Ac
  MOD_RES (4)..(4): Alpha-Me R8-octenyl-alanine olefin amino acid connected by an all-carbon crosslinker comprising one double bond
  misc_feature (4)..(11): Crosslink between residues
  MOD_RES (10)..(10): Tert-butyl-Gly
  MOD_RES (11)..(11): Alpha-Me S5-pentenyl-alanine olefin amino acid connected by an all-carbon crosslinker comprising one double bond
  C-term NH2
LTFAHYWAQGAS

SEQ ID NO: 947 - protein, 12 aa, Artificial Sequence
  Description of Artificial Sequence: Synthetic peptide
  N-term Ac
  MOD_RES (4)..(4): Alpha-Me R8-octenyl-alanine olefin amino acid connected by an all-carbon crosslinker comprising one double bond
  misc_feature (4)..(11): Crosslink between residues
  MOD_RES (10)..(10): Adamantyl-Gly
  MOD_RES (11)..(11): Alpha-Me S5-pentenyl-alanine olefin amino acid connected by an all-carbon crosslinker comprising one double bond
  C-term NH2
LTFAHYWAQGAS

SEQ ID NO: 948 - protein, 12 aa, Artificial Sequence
  Description of Artificial Sequence: Synthetic peptide
  N-term Ac
  MOD_RES (4)..(4): Alpha-Me R8-octenyl-alanine olefin amino acid connected by an all-carbon crosslinker comprising one double bond
  misc_feature (4)..(11): Crosslink between residues
  MOD_RES (10)..(10): homo-cyclohexyl-Ala
  MOD_RES (11)..(11): Alpha-Me S5-pentenyl-alanine olefin amino acid connected by an all-carbon crosslinker comprising one double bond
  C-term NH2
LTFAHYWAQAAS

SEQ ID NO: 949 - protein, 12 aa, Artificial Sequence
  Description of Artificial Sequence: Synthetic peptide
  N-term Ac
  MOD_RES (4)..(4): Alpha-Me R8-octenyl-alanine olefin amino acid connected by an all-carbon crosslinker comprising one double bond
  misc_feature (4)..(11): Crosslink between residues
  MOD_RES (10)..(10): Cyclohexyl-Ala
  MOD_RES (11)..(11): Alpha-Me S5-pentenyl-alanine olefin amino acid connected by an all-carbon crosslinker comprising one double bond
  C-term NH2
LTFAHYWAQAAS

SEQ ID NO: 950 - protein, 12 aa, Artificial Sequence
  Description of Artificial Sequence: Synthetic peptide
  N-term Ac
  MOD_RES (4)..(4): Alpha-Me R8-octenyl-alanine olefin amino acid connected by an all-carbon crosslinker comprising one double bond
  misc_feature (4)..(11): Crosslink between residues
  MOD_RES (8)..(8): Ac6c
  MOD_RES (11)..(11): Alpha-Me S5-pentenyl-alanine olefin amino acid connected by an all-carbon crosslinker comprising one double bond
  C-term NH2
LTFAHYWXQLAS

SEQ ID NO: 951 - protein, 12 aa, Artificial Sequence
  Description of Artificial Sequence: Synthetic peptide
  N-term Ac
  MOD_RES (4)..(4): Alpha-Me R8-octenyl-alanine olefin amino acid connected by an all-carbon crosslinker comprising one double bond
  misc_feature (4)..(11): Crosslink between residues
  MOD_RES (8)..(8): Ac5c
  MOD_RES (11)..(11): Alpha-Me S5-pentenyl-alanine olefin amino acid connected by an all-carbon crosslinker comprising one double bond
  C-term NH2
LTFAHYWXQLAS

SEQ ID NO: 952 - protein, 12 aa, Artificial Sequence
  Description of Artificial Sequence: Synthetic peptide
  N-term Ac
  MOD_RES (3)..(3): homo-Phe
  MOD_RES (4)..(4): Alpha-Me R8-octenyl-alanine olefin amino acid connected by an all-carbon crosslinker comprising one double bond
  misc_feature (4)..(11): Crosslink between residues
  MOD_RES (11)..(11): Alpha-Me S5-pentenyl-alanine olefin amino acid connected by an all-carbon crosslinker comprising one double bond
  C-term NH2
LTFAHYWAQLAS

SEQ ID NO: 953 - protein, 12 aa, Artificial Sequence
  Description of Artificial Sequence: Synthetic peptide
  N-term Ac
  MOD_RES (3)..(3): Indanyl-Gly
  MOD_RES (4)..(4): Alpha-Me R8-octenyl-alanine olefin amino acid connected by an all-carbon crosslinker comprising one double bond
  misc_feature (4)..(11): Crosslink between residues
  MOD_RES (11)..(11): Alpha-Me S5-pentenyl-alanine olefin amino acid connected by an all-carbon crosslinker comprising one double bond
  C-term NH2
LTGAHYWAQLAS

SEQ ID NO: 954 - protein, 12 aa, Artificial Sequence
  Description of Artificial Sequence: Synthetic peptide
  N-term Ac
  MOD_RES (4)..(4): Alpha-Me R8-octenyl-alanine olefin amino acid connected by an all-carbon crosslinker comprising one double bond
  misc_feature (4)..(11): Crosslink between residues
  MOD_RES (10)..(10): Cyclohexyl-Gly
  MOD_RES (11)..(11): Alpha-Me S5-pentenyl-alanine olefin amino acid connected by an all-carbon crosslinker comprising one double bond
  C-term NH2
LTFAHYWAQGAS

SEQ ID NO: 955 - protein, 12 aa, Artificial Sequence
  Description of Artificial Sequence: Synthetic peptide
  N-term Ac
  MOD_RES (4)..(4): Alpha-Me R8-octenyl-alanine olefin amino acid connected by an all-carbon crosslinker comprising one double bond
  misc_feature (4)..(11): Crosslink between residues
  MOD_RES (11)..(11): Alpha-Me S5-pentenyl-alanine olefin amino acid connected by an all-carbon crosslinker comprising one double bond
  C-term NH2
LTFAHYWAQFAS

SEQ ID NO: 956 - protein, 12 aa, Artificial Sequence
  Description of Artificial Sequence: Synthetic peptide
  N-term Ac
  MOD_RES (4)..(4): Alpha-Me R8-octenyl-alanine olefin amino acid connected by an all-carbon crosslinker comprising one double bond
  misc_feature (4)..(11): Crosslink between residues
  MOD_RES (10)..(10): Indanyl-Gly
  MOD_RES (11)..(11): Alpha-Me S5-pentenyl-alanine olefin amino acid connected by an all-carbon crosslinker comprising one double bond
  C-term NH2
LTFAHYWAQGAS

SEQ ID NO: 957 - protein, 12 aa, Artificial Sequence
  Description of Artificial Sequence: Synthetic peptide
  N-term Ac
  MOD_RES (4)..(4): Alpha-Me R8-octenyl-alanine olefin amino acid connected by an all-carbon crosslinker comprising one double bond
  misc_feature (4)..(11): Crosslink between residues
  MOD_RES (10)..(10): Cyclobutyl-Ala
  MOD_RES (11)..(11): Alpha-Me S5-pentenyl-alanine olefin amino acid connected by an all-carbon crosslinker comprising one double bond
  C-term NH2
LTFAHYWAQAAS

SEQ ID NO: 958 - protein, 12 aa, Artificial Sequence
  Description of Artificial Sequence: Synthetic peptide
  N-term Ac
  MOD_RES (4)..(4): Alpha-Me R8-octenyl-alanine olefin amino acid connected by an all-carbon crosslinker comprising one double bond
  misc_feature (4)..(11): Crosslink between residues
  MOD_RES (10)..(10): Cyclopentyl-Gly
  MOD_RES (11)..(11): Alpha-Me S5-pentenyl-alanine olefin amino acid connected by an all-carbon crosslinker comprising one double bond
  C-term NH2
LTFAHYWAQGAS

SEQ ID NO: 959 - protein, 12 aa, Artificial Sequence
  Description of Artificial Sequence: Synthetic peptide
  N-term Ac
  MOD_RES (4)..(4): Alpha-Me R8-octenyl-alanine olefin amino acid connected by an all-carbon crosslinker comprising one double bond
  misc_feature (4)..(11): Crosslink between residues
  MOD_RES (6)..(6): hY
  MOD_RES (11)..(11): Alpha-Me S5-pentenyl-alanine olefin amino acid connected by an all-carbon crosslinker comprising one double bond
  C-term NH2
LTFAHYWAQLAS

SEQ ID NO: 960 - protein, 10 aa, Artificial Sequence
  Description of Artificial Sequence: Synthetic peptide
  N-term Ac
  MOD_RES (2)..(2): Alpha-Me R8-octenyl-alanine olefin amino acid connected by an all-carbon crosslinker comprising one double bond
  misc_feature (2)..(9): Crosslink between residues
  MOD_RES (7)..(7): Ac3c
  MOD_RES (8)..(8): hLeu
  MOD_RES (9)..(9): Alpha-Me S5-pentenyl-alanine olefin amino acid connected by an all-carbon crosslinker comprising one double bond
  C-term NH2
FAAYWEXLAA

SEQ ID NO: 961 - protein, 10 aa, Artificial Sequence
  Description of Artificial Sequence: Synthetic peptide
  N-term Ac
  MOD_RES (2)..(2): Alpha-Me R8-octenyl-alanine olefin amino acid connected by an all-carbon crosslinker comprising one double bond
  misc_feature (2)..(9): Crosslink between residues
  MOD_RES (7)..(7): Ac3c
  MOD_RES (8)..(8): Tert-butyl-Gly
  MOD_RES (9)..(9): Alpha-Me S5-pentenyl-alanine olefin amino acid connected by an all-carbon crosslinker comprising one double bond
  C-term NH2
FAAYWEXGAA

SEQ ID NO: 962 - protein, 10 aa, Artificial Sequence
  Description of Artificial Sequence: Synthetic peptide
  N-term Ac
  MOD_RES (2)..(2): Alpha-Me R8-octenyl-alanine olefin amino acid connected by an all-carbon crosslinker comprising one double bond
  misc_feature (2)..(9): Crosslink between residues
  MOD_RES (7)..(7): Ac3c
  MOD_RES (8)..(8): Adamantyl-Gly
  MOD_RES (9)..(9): Alpha-Me S5-pentenyl-alanine olefin amino acid connected by an all-carbon crosslinker comprising one double bond
  C-term NH2
FAAYWEXGAA

SEQ ID NO: 963 - protein, 10 aa, Artificial Sequence
  Description of Artificial Sequence: Synthetic peptide
  N-term Ac
  MOD_RES (2)..(2): Alpha-Me R8-octenyl-alanine olefin amino acid connected by an all-carbon crosslinker comprising one double bond
  misc_feature (2)..(9): Crosslink between residues
  MOD_RES (7)..(7): Ac3c
  MOD_RES (8)..(8): homo-cyclohexyl-Ala
  MOD_RES (9)..(9): Alpha-Me S5-pentenyl-alanine olefin amino acid connected by an all-carbon crosslinker comprising one double bond
  C-term NH2
FAAYWEXAAA

SEQ ID NO: 964 - protein, 10 aa, Artificial Sequence
  Description of Artificial Sequence: Synthetic peptide
  N-term Ac
  MOD_RES (2)..(2): Alpha-Me R8-octenyl-alanine olefin amino acid connected by an all-carbon crosslinker comprising one double bond
  misc_feature (2)..(9): Crosslink between residues
  MOD_RES (7)..(7): Ac3c
  MOD_RES (8)..(8): Cyclohexyl-Ala
  MOD_RES (9)..(9): Alpha-Me S5-pentenyl-alanine olefin amino acid connected by an all-carbon crosslinker comprising one double bond
  C-term NH2
FAAYWEXAAA

SEQ ID NO: 965 - protein, 10 aa, Artificial Sequence
  Description of Artificial Sequence: Synthetic peptide
  N-term Ac
  MOD_RES (2)..(2): Alpha-Me R8-octenyl-alanine olefin amino acid connected by an all-carbon crosslinker comprising one double bond
  misc_feature (2)..(9): Crosslink between residues
  MOD_RES (7)..(7): Ac6c
  MOD_RES (9)..(9): Alpha-Me S5-pentenyl-alanine olefin amino acid connected by an all-carbon crosslinker comprising one double bond
  C-term NH2
FAAYWEXLAA

SEQ ID NO: 966 - protein, 10 aa, Artificial Sequence
  Description of Artificial Sequence: Synthetic peptide
  N-term Ac
  MOD_RES (2)..(2): Alpha-Me R8-octenyl-alanine olefin amino acid connected by an all-carbon crosslinker comprising one double bond
  misc_feature (2)..(9): Crosslink between residues
  MOD_RES (7)..(7): Ac5c
  MOD_RES (9)..(9): Alpha-Me S5-pentenyl-alanine olefin amino acid connected by an all-carbon crosslinker comprising one double bond
  C-term NH2
FAAYWEXLAA

SEQ ID NO: 967 - protein, 10 aa, Artificial Sequence
  Description of Artificial Sequence: Synthetic peptide
  N-term Ac
  MOD_RES (1)..(1): homo-Phe
  MOD_RES (2)..(2): Alpha-Me R8-octenyl-alanine olefin amino acid connected by an all-carbon crosslinker comprising one double bond
  misc_feature (2)..(9): Crosslink between residues
  MOD_RES (7)..(7): Ac3c
  MOD_RES (9)..(9): Alpha-Me S5-pentenyl-alanine olefin amino acid connected by an all-carbon crosslinker comprising one double bond
  C-term NH2
FAAYWEXLAA

SEQ ID NO: 968 - protein, 10 aa, Artificial Sequence
  Description of Artificial Sequence: Synthetic peptide
  N-term Ac
  MOD_RES (1)..(1): Indanyl-Gly
  MOD_RES (2)..(2): Alpha-Me R8-octenyl-alanine olefin amino acid connected by an all-carbon crosslinker comprising one double bond
  misc_feature (2)..(9): Crosslink between residues
  MOD_RES (7)..(7): Ac3c
  MOD_RES (9)..(9): Alpha-Me S5-pentenyl-alanine olefin amino acid connected by an all-carbon crosslinker comprising one double bond
  C-term NH2
GAAYWEXLAA

SEQ ID NO: 969 - protein, 10 aa, Artificial Sequence
  Description of Artificial Sequence: Synthetic peptide
  N-term Ac
  MOD_RES (2)..(2): Alpha-Me R8-octenyl-alanine olefin amino acid connected by an all-carbon crosslinker comprising one double bond
  misc_feature (2)..(9): Crosslink between residues
  MOD_RES (7)..(7): Ac3c
  MOD_RES (9)..(9): Alpha-Me S5-pentenyl-alanine olefin amino acid connected by an all-carbon crosslinker comprising one double bond
  C-term NH2
FAAYWEXFAA

SEQ ID NO: 970 - protein, 10 aa, Artificial Sequence
  Description of Artificial Sequence: Synthetic peptide
  N-term Ac
  MOD_RES (2)..(2): Alpha-Me R8-octenyl-alanine olefin amino acid connected by an all-carbon crosslinker comprising one double bond
  misc_feature (2)..(9): Crosslink between residues
  MOD_RES (7)..(7): Ac3c
  MOD_RES (8)..(8): Indanyl-Gly
  MOD_RES (9)..(9): Alpha-Me S5-pentenyl-alanine olefin amino acid connected by an all-carbon crosslinker comprising one double bond
  C-term NH2
FAAYWEXGAA

SEQ ID NO: 971 - protein, 10 aa, Artificial Sequence
  Description of Artificial Sequence: Synthetic peptide
  N-term Ac
  MOD_RES (2)..(2): Alpha-Me R8-octenyl-alanine olefin amino acid connected by an all-carbon crosslinker comprising one double bond
  misc_feature (2)..(9): Crosslink between residues
  MOD_RES (7)..(7): Ac3c
  MOD_RES (8)..(8): Cyclobutyl-Ala
  MOD_RES (9)..(9): Alpha-Me S5-pentenyl-alanine olefin amino acid connected by an all-carbon crosslinker comprising one double bond
  C-term NH2
FAAYWEXAAA

SEQ ID NO: 972 - protein, 10 aa, Artificial Sequence
  Description of Artificial Sequence: Synthetic peptide
  N-term Ac
  MOD_RES (2)..(2): Alpha-Me R8-octenyl-alanine olefin amino acid connected by an all-carbon crosslinker comprising one double bond
  misc_feature (2)..(9): Crosslink between residues
  MOD_RES (7)..(7): Ac3c
  MOD_RES (8)..(8): Cyclopentyl-Gly
  MOD_RES (9)..(9): Alpha-Me S5-pentenyl-alanine olefin amino acid connected by an all-carbon crosslinker comprising one double bond
  C-term NH2
FAAYWEXGAA

SEQ ID NO: 973 - protein, 10 aa, Artificial Sequence
  Description of Artificial Sequence: Synthetic peptide
  N-term Ac
  MOD_RES (2)..(2): Alpha-Me R8-octenyl-alanine olefin amino acid connected by an all-carbon crosslinker comprising one double bond
  misc_feature (2)..(9): Crosslink between residues
  MOD_RES (4)..(4): hY
  MOD_RES (7)..(7): Ac3c
  MOD_RES (9)..(9): Alpha-Me S5-pentenyl-alanine olefin amino acid connected by an all-carbon crosslinker comprising one double bond
  C-term NH2
FAAYWEXLAA

SEQ ID NO: 974 - protein, 10 aa, Artificial Sequence
  Description of Artificial Sequence: Synthetic peptide
  N-term Ac
  MOD_RES (2)..(2): Alpha-Me R8-octenyl-alanine olefin amino acid connected by an all-carbon crosslinker comprising one double bond
  misc_feature (2)..(9): Crosslink between residues
  MOD_RES (7)..(7): Ac3c
  MOD_RES (9)..(9): Alpha-Me S5-pentenyl-alanine olefin amino acid connected by an all-carbon crosslinker comprising one double bond
  C-term NH2
FAAYWEXLAQ

SEQ ID NO: 975 - protein, 10 aa, Artificial Sequence
  Description of Artificial Sequence: Synthetic peptide
  N-term Ac
  MOD_RES (2)..(2): Alpha-Me R8-octenyl-alanine olefin amino acid connected by an all-carbon crosslinker comprising one double bond
  misc_feature (2)..(9): Crosslink between residues
  MOD_RES (7)..(7): 2-aminoisobutyric acid
  MOD_RES (9)..(9): Alpha-Me S5-pentenyl-alanine olefin amino acid connected by an all-carbon crosslinker comprising one double bond
  C-term NH2
FAAYWEXLAA

SEQ ID NO: 976 - protein, 10 aa, Artificial Sequence
  Description of Artificial Sequence: Synthetic peptide
  N-term Ac
  MOD_RES (2)..(2): Alpha-Me R8-octenyl-alanine olefin amino acid connected by an all-carbon crosslinker comprising one double bond
  misc_feature (2)..(9): Crosslink between residues
  MOD_RES (9)..(9): Alpha-Me S5-pentenyl-alanine olefin amino acid connected by an all-carbon crosslinker comprising one double bond
  C-term NH2
FAAYWEALAA

SEQ ID NO: 977 - protein, 12 aa, Artificial Sequence
  Description of Artificial Sequence: Synthetic peptide
  N-term Ac
  MOD_RES (4)..(4): Alpha-Me R8-octenyl-alanine olefin amino acid connected by an all-carbon crosslinker comprising one double bond
  misc_feature (4)..(11): Crosslink between residues
  MOD_RES (11)..(11): Alpha-Me S5-pentenyl-alanine olefin amino acid connected by an all-carbon crosslinker comprising one double bond
  C-term NH2
LAFAAYWAALAA

SEQ ID NO: 978 - protein, 12 aa, Artificial Sequence
  Description of Artificial Sequence: Synthetic peptide
  N-term Ac
  MOD_RES (4)..(4): Alpha-Me R8-octenyl-alanine olefin amino acid connected by an all-carbon crosslinker comprising one double bond
  misc_feature (4)..(11): Crosslink between residues
  MOD_RES (9)..(9): Ac3c
  MOD_RES (11)..(11): Alpha-Me S5-pentenyl-alanine olefin amino acid connected by an all-carbon crosslinker comprising one double bond
  C-term NH2
LTFAHYWAXLAS

SEQ ID NO: 979 - protein, 12 aa, Artificial Sequence
  Description of Artificial Sequence: Synthetic peptide
  N-term Ac
  MOD_RES (1)..(1): Norleucine
  MOD_RES (4)..(4): Alpha-Me R8-octenyl-alanine olefin amino acid connected by an all-carbon crosslinker comprising one double bond
  misc_feature (4)..(11): Crosslink between residues
  MOD_RES (11)..(11): Alpha-Me S5-pentenyl-alanine olefin amino acid connected by an all-carbon crosslinker comprising one double bond
  C-term NH2
LTFAHYWAQLAS

SEQ ID NO: 980 - protein, 12 aa, Artificial Sequence
  Description of Artificial Sequence: Synthetic peptide
  N-term Ac
  MOD_RES (4)..(4): Alpha-Me R8-octenyl-alanine olefin amino acid connected by an all-carbon crosslinker comprising one double bond
  misc_feature (4)..(11): Crosslink between residues
  MOD_RES (11)..(11): Alpha-Me S5-pentenyl-alanine olefin amino acid connected by an all-carbon crosslinker comprising one double bond
  C-term NH2
VTFAHYWAQLAS

SEQ ID NO: 981 - protein, 12 aa, Artificial Sequence
  Description of Artificial Sequence: Synthetic peptide
  N-term Ac
  MOD_RES (4)..(4): Alpha-Me R8-octenyl-alanine olefin amino acid connected by an all-carbon crosslinker comprising one double bond
  misc_feature (4)..(11): Crosslink between residues
  MOD_RES (11)..(11): Alpha-Me S5-pentenyl-alanine olefin amino acid connected by an all-carbon crosslinker comprising one double bond
  C-term NH2
FTFAHYWAQLAS

SEQ ID NO: 982 - protein, 12 aa, Artificial Sequence
  Description of Artificial Sequence: Synthetic peptide
  N-term Ac
  MOD_RES (4)..(4): Alpha-Me R8-octenyl-alanine olefin amino acid connected by an all-carbon crosslinker comprising one double bond
  misc_feature (4)..(11): Crosslink between residues
  MOD_RES (11)..(11): Alpha-Me S5-pentenyl-alanine olefin amino acid connected by an all-carbon crosslinker comprising one double bond
  C-term NH2
WTFAHYWAQLAS

SEQ ID NO: 983 - protein, 12 aa, Artificial Sequence
  Description of Artificial Sequence: Synthetic peptide
  N-term Ac
  MOD_RES (4)..(4): Alpha-Me R8-octenyl-alanine olefin amino acid connected by an all-carbon crosslinker comprising one double bond
  misc_feature (4)..(11): Crosslink between residues
  MOD_RES (11)..(11): Alpha-Me S5-pentenyl-alanine olefin amino acid connected by an all-carbon crosslinker comprising one double bond
  C-term NH2
RTFAHYWAQLAS

SEQ ID NO: 984 - protein, 12 aa, Artificial Sequence
  Description of Artificial Sequence: Synthetic peptide
  N-term Ac
  MOD_RES (4)..(4): Alpha-Me R8-octenyl-alanine olefin amino acid connected by an all-carbon crosslinker comprising one double bond
  misc_feature (4)..(11): Crosslink between residues
  MOD_RES (11)..(11): Alpha-Me S5-pentenyl-alanine olefin amino acid connected by an all-carbon crosslinker comprising one double bond
  C-term NH2
KTFAHYWAQLAS

SEQ ID NO: 985 - protein, 12 aa, Artificial Sequence
  Description of Artificial Sequence: Synthetic peptide
  N-term Ac
  MOD_RES (2)..(2): Norleucine
  MOD_RES (4)..(4): Alpha-Me R8-octenyl-alanine olefin amino acid connected by an all-carbon crosslinker comprising one double bond
  misc_feature (4)..(11): Crosslink between residues
  MOD_RES (11)..(11): Alpha-Me S5-pentenyl-alanine olefin amino acid connected by an all-carbon crosslinker comprising one double bond
  C-term NH2
LLFAHYWAQLAS

SEQ ID NO: 986 - protein, 12 aa, Artificial Sequence
  Description of Artificial Sequence: Synthetic peptide
  N-term Ac
  MOD_RES (4)..(4): Alpha-Me R8-octenyl-alanine olefin amino acid connected by an all-carbon crosslinker comprising one double bond
  misc_feature (4)..(11): Crosslink between residues
  MOD_RES (11)..(11): Alpha-Me S5-pentenyl-alanine olefin amino acid connected by an all-carbon crosslinker comprising one double bond
  C-term NH2
LVFAHYWAQLAS

SEQ ID NO: 987 - protein, 12 aa, Artificial Sequence
  Description of Artificial Sequence: Synthetic peptide
  N-term Ac
  MOD_RES (4)..(4): Alpha-Me R8-octenyl-alanine olefin amino acid connected by an all-carbon crosslinker comprising one double bond
  misc_feature (4)..(11): Crosslink between residues
  MOD_RES (11)..(11): Alpha-Me S5-pentenyl-alanine olefin amino acid connected by an all-carbon crosslinker comprising one double bond
  C-term NH2
LFFAHYWAQLAS

SEQ ID NO: 988 - protein, 12 aa, Artificial Sequence
  Description of Artificial Sequence: Synthetic peptide
  N-term Ac
  MOD_RES (4)..(4): Alpha-Me R8-octenyl-alanine olefin amino acid connected by an all-carbon crosslinker comprising one double bond
  misc_feature (4)..(11): Crosslink between residues
  MOD_RES (11)..(11): Alpha-Me S5-pentenyl-alanine olefin amino acid connected by an all-carbon crosslinker comprising one double bond
  C-term NH2
LWFAHYWAQLAS

SEQ ID NO: 989 - protein, 12 aa, Artificial Sequence
  Description of Artificial Sequence: Synthetic peptide
  N-term Ac
  MOD_RES (4)..(4): Alpha-Me R8-octenyl-alanine olefin amino acid connected by an all-carbon crosslinker comprising one double bond
  misc_feature (4)..(11): Crosslink between residues
  MOD_RES (11)..(11): Alpha-Me S5-pentenyl-alanine olefin amino acid connected by an all-carbon crosslinker comprising one double bond
  C-term NH2
LRFAHYWAQLAS

SEQ ID NO: 990 - protein, 12 aa, Artificial Sequence
  Description of Artificial Sequence: Synthetic peptide
  N-term Ac
  MOD_RES (4)..(4): Alpha-Me R8-octenyl-alanine olefin amino acid connected by an all-carbon crosslinker comprising one double bond
  misc_feature (4)..(11): Crosslink between residues
  MOD_RES (11)..(11): Alpha-Me S5-pentenyl-alanine olefin amino acid connected by an all-carbon crosslinker comprising one double bond
  C-term NH2
LKFAHYWAQLAS

SEQ ID NO: 991 - protein, 12 aa, Artificial Sequence
  Description of Artificial Sequence: Synthetic peptide
  N-term Ac
  MOD_RES (4)..(4): Alpha-Me R8-octenyl-alanine olefin amino acid connected by an all-carbon crosslinker comprising one double bond
  misc_feature (4)..(11): Crosslink between residues
  MOD_RES (5)..(5): Norleucine
  MOD_RES (11)..(11): Alpha-Me S5-pentenyl-alanine olefin amino acid connected by an all-carbon crosslinker comprising one double bond
  C-term NH2
LTFALYWAQLAS

SEQ ID NO: 992 - protein, 12 aa, Artificial Sequence
  Description of Artificial Sequence: Synthetic peptide
  N-term Ac
  MOD_RES (4)..(4): Alpha-Me R8-octenyl-alanine olefin amino acid connected by an all-carbon crosslinker comprising one double bond
  misc_feature (4)..(11): Crosslink between residues
  MOD_RES (11)..(11): Alpha-Me S5-pentenyl-alanine olefin amino acid connected by an all-carbon crosslinker comprising one double bond
  C-term NH2
LTFAVYWAQLAS

SEQ ID NO: 993 - protein, 12 aa, Artificial Sequence
  Description of Artificial Sequence: Synthetic peptide
  N-term Ac
  MOD_RES (4)..(4): Alpha-Me R8-octenyl-alanine olefin amino acid connected by an all-carbon crosslinker comprising one double bond
  misc_feature (4)..(11): Crosslink between residues
  MOD_RES (11)..(11): Alpha-Me S5-pentenyl-alanine olefin amino acid connected by an all-carbon crosslinker comprising one double bond
  C-term NH2
LTFAFYWAQLAS

SEQ ID NO: 994 - protein, 12 aa, Artificial Sequence
  Description of Artificial Sequence: Synthetic peptide
  N-term Ac
  MOD_RES (4)..(4): Alpha-Me R8-octenyl-alanine olefin amino acid connected by an all-carbon crosslinker comprising one double bond
  misc_feature (4)..(11): Crosslink between residues
  MOD_RES (11)..(11): Alpha-Me S5-pentenyl-alanine olefin amino acid connected by an all-carbon crosslinker comprising one double bond
  C-term NH2
LTFAWYWAQLAS

SEQ ID NO: 995 - protein, 12 aa, Artificial Sequence
  Description of Artificial Sequence: Synthetic peptide
  N-term Ac
  MOD_RES (4)..(4): Alpha-Me R8-octenyl-alanine olefin amino acid connected by an all-carbon crosslinker comprising one double bond
  misc_feature (4)..(11): Crosslink between residues
  MOD_RES (11)..(11): Alpha-Me S5-pentenyl-alanine olefin amino acid connected by an all-carbon crosslinker comprising one double bond
  C-term NH2
LTFARYWAQLAS

SEQ ID NO: 996 - protein, 12 aa, Artificial Sequence
  Description of Artificial Sequence: Synthetic peptide
  N-term Ac
  MOD_RES (4)..(4): Alpha-Me R8-octenyl-alanine olefin amino acid connected by an all-carbon crosslinker comprising one double bond
  misc_feature (4)..(11): Crosslink between residues
  MOD_RES (11)..(11): Alpha-Me S5-pentenyl-alanine olefin amino acid connected by an all-carbon crosslinker comprising one double bond
  C-term NH2
LTFAKYWAQLAS

SEQ ID NO: 997 - protein, 12 aa, Artificial Sequence
  Description of Artificial Sequence: Synthetic peptide
  N-term Ac
  MOD_RES (4)..(4): Alpha-Me R8-octenyl-alanine olefin amino acid connected by an all-carbon crosslinker comprising one double bond
  misc_feature (4)..(11): Crosslink between residues
  MOD_RES (6)..(6): Norleucine
  MOD_RES (11)..(11): Alpha-Me S5-pentenyl-alanine olefin amino acid connected by an all-carbon crosslinker comprising one double bond
  C-term NH2
LTFAHLWAQLAS

SEQ ID NO: 998 - protein, 12 aa, Artificial Sequence
  Description of Artificial Sequence: Synthetic peptide
  N-term Ac
  MOD_RES (4)..(4): Alpha-Me R8-octenyl-alanine olefin amino acid connected by an all-carbon crosslinker comprising one double bond
  misc_feature (4)..(11): Crosslink between residues
  MOD_RES (11)..(11): Alpha-Me S5-pentenyl-alanine olefin amino acid connected by an all-carbon crosslinker comprising one double bond
  C-term NH2
LTFAHVWAQLAS

SEQ ID NO: 999 - protein, 12 aa, Artificial Sequence
  Description of Artificial Sequence: Synthetic peptide
  N-term Ac
  MOD_RES (4)..(4): Alpha-Me R8-octenyl-alanine olefin amino acid connected by an all-carbon crosslinker comprising one double bond
  misc_feature (4)..(11): Crosslink between residues
  MOD_RES (11)..(11): Alpha-Me S5-pentenyl-alanine olefin amino acid connected by an all-carbon crosslinker comprising one double bond
  C-term NH2
LTFAHFWAQLAS

SEQ ID NO: 1000 - protein, 12 aa, Artificial Sequence
  Description of Artificial Sequence: Synthetic peptide
  N-term Ac
  MOD_RES (4)..(4): Alpha-Me R8-octenyl-alanine olefin amino acid connected by an all-carbon crosslinker comprising one double bond
  misc_feature (4)..(11): Crosslink between residues
  MOD_RES (11)..(11): Alpha-Me S5-pentenyl-alanine olefin amino acid connected by an all-carbon crosslinker comprising one double bond
  C-term NH2
LTFAHWWAQLAS

SEQ ID NO: 1001 - protein, 12 aa, Artificial Sequence
  Description of Artificial Sequence: Synthetic peptide
  N-term Ac
  MOD_RES (4)..(4): Alpha-Me R8-octenyl-alanine olefin amino acid connected by an all-carbon crosslinker comprising one double bond
  misc_feature (4)..(11): Crosslink between residues
  MOD_RES (11)..(11): Alpha-Me S5-pentenyl-alanine olefin amino acid connected by an all-carbon crosslinker comprising one double bond
  C-term NH2
LTFAHRWAQLAS

SEQ ID NO: 1002 - protein, 12 aa, Artificial Sequence
  Description of Artificial Sequence: Synthetic peptide
  N-term Ac
  MOD_RES (4)..(4): Alpha-Me R8-octenyl-alanine olefin amino acid connected by an all-carbon crosslinker comprising one double bond
  misc_feature (4)..(11): Crosslink between residues
  MOD_RES (11)..(11): Alpha-Me S5-pentenyl-alanine olefin amino acid connected by an all-carbon crosslinker comprising one double bond
  C-term NH2
LTFAHKWAQLAS

SEQ ID NO: 1003 - protein, 12 aa, Artificial Sequence
  Description of Artificial Sequence: Synthetic peptide
  N-term Ac
  MOD_RES (4)..(4): Alpha-Me R8-octenyl-alanine olefin amino acid connected by an all-carbon crosslinker comprising one double bond
  misc_feature (4)..(11): Crosslink between residues
  MOD_RES (8)..(8): Norleucine
  MOD_RES (11)..(11): Alpha-Me S5-pentenyl-alanine olefin amino acid connected by an all-carbon crosslinker comprising one double bond
  C-term NH2
LTFAHYWLQLAS

SEQ ID NO: 1004 - protein, 12 aa, Artificial Sequence
  Description of Artificial Sequence: Synthetic peptide
  N-term Ac
  MOD_RES (4)..(4): Alpha-Me R8-octenyl-alanine olefin amino acid connected by an all-carbon crosslinker comprising one double bond
  misc_feature (4)..(11): Crosslink between residues
  MOD_RES (11)..(11): Alpha-Me S5-pentenyl-alanine olefin amino acid connected by an all-carbon crosslinker comprising one double bond
  C-term NH2
LTFAHYWVQLAS

SEQ ID NO: 1005 - protein, 12 aa, Artificial Sequence
  Description of Artificial Sequence: Synthetic peptide
  N-term Ac
  MOD_RES (4)..(4): Alpha-Me R8-octenyl-alanine olefin amino acid connected by an all-carbon crosslinker comprising one double bond
  misc_feature (4)..(11): Crosslink between residues
  MOD_RES (11)..(11): Alpha-Me S5-pentenyl-alanine olefin amino acid connected by an all-carbon crosslinker comprising one double bond
  C-term NH2
LTFAHYWFQLAS

SEQ ID NO: 1006 - protein, 12 aa, Artificial Sequence
  Description of Artificial Sequence: Synthetic peptide
  N-term Ac
  MOD_RES (4)..(4): Alpha-Me R8-octenyl-alanine olefin amino acid connected by an all-carbon crosslinker comprising one double bond
  misc_feature (4)..(11): Crosslink between residues
  MOD_RES (11)..(11): Alpha-Me S5-pentenyl-alanine olefin amino acid connected by an all-carbon crosslinker comprising one double bond
  C-term NH2
LTFAHYWWQLAS

SEQ ID NO: 1007 - protein, 12 aa, Artificial Sequence
  Description of Artificial Sequence: Synthetic peptide
  N-term Ac
  MOD_RES (4)..(4): Alpha-Me R8-octenyl-alanine olefin amino acid connected by an all-carbon crosslinker comprising one double bond
  misc_feature (4)..(11): Crosslink between residues
  MOD_RES (11)..(11): Alpha-Me S5-pentenyl-alanine olefin amino acid connected by an all-carbon crosslinker comprising one double bond
  C-term NH2
LTFAHYWKQLAS

SEQ ID NO: 1008 - protein, 12 aa, Artificial Sequence
  Description of Artificial Sequence: Synthetic peptide
  N-term Ac
  MOD_RES (4)..(4): Alpha-Me R8-octenyl-alanine olefin amino acid connected by an all-carbon crosslinker comprising one double bond
  misc_feature (4)..(11): Crosslink between residues
  MOD_RES (9)..(9): Norleucine
  MOD_RES (11)..(11): Alpha-Me S5-pentenyl-alanine olefin amino acid connected by an all-carbon crosslinker comprising one double bond
  C-term NH2
LTFAHYWALLAS

SEQ ID NO: 1009 - protein, 12 aa, Artificial Sequence
  Description of Artificial Sequence: Synthetic peptide
  N-term Ac
  MOD_RES (4)..(4): Alpha-Me R8-octenyl-alanine olefin amino acid connected by an all-carbon crosslinker comprising one double bond
  misc_feature (4)..(11): Crosslink between residues
  MOD_RES (11)..(11): Alpha-Me S5-pentenyl-alanine olefin amino acid connected by an all-carbon crosslinker comprising one double bond
  C-term NH2
LTFAHYWAVLAS

SEQ ID NO: 1010 - protein, 12 aa, Artificial Sequence
  Description of Artificial Sequence: Synthetic peptide
  N-term Ac
  MOD_RES (4)..(4): Alpha-Me R8-octenyl-alanine olefin amino acid connected by an all-carbon crosslinker comprising one double bond
  misc_feature (4)..(11): Crosslink between residues
  MOD_RES (11)..(11): Alpha-Me S5-pentenyl-alanine olefin amino acid connected by an all-carbon crosslinker comprising one double bond
  C-term NH2
LTFAHYWAFLAS

SEQ ID NO: 1011 - protein, 12 aa, Artificial Sequence
  Description of Artificial Sequence: Synthetic peptide
  N-term Ac
  MOD_RES (4)..(4): Alpha-Me R8-octenyl-alanine olefin amino acid connected by an all-carbon crosslinker comprising one double bond
  misc_feature (4)..(11): Crosslink between residues
  MOD_RES (11)..(11): Alpha-Me S5-pentenyl-alanine olefin amino acid connected by an all-carbon crosslinker comprising one double bond
  C-term NH2
LTFAHYWAWLAS

SEQ ID NO: 1012 - protein, 12 aa, Artificial Sequence
  Description of Artificial Sequence: Synthetic peptide
  N-term Ac
  MOD_RES (4)..(4): Alpha-Me R8-octenyl-alanine olefin amino acid connected by an all-carbon crosslinker comprising one double bond
  misc_feature (4)..(11): Crosslink between residues
  MOD_RES (11)..(11): Alpha-Me S5-pentenyl-alanine olefin amino acid connected by an all-carbon crosslinker comprising one double bond
  C-term NH2
LTFAHYWARLAS

SEQ ID NO: 1013 - protein, 12 aa, Artificial Sequence
  Description of Artificial Sequence: Synthetic peptide
  N-term Ac
  MOD_RES (4)..(4): Alpha-Me R8-octenyl-alanine olefin amino acid connected by an all-carbon crosslinker comprising one double bond
  misc_feature (4)..(11): Crosslink between residues
  MOD_RES (11)..(11): Alpha-Me S5-pentenyl-alanine olefin amino acid connected by an all-carbon crosslinker comprising one double bond
  MOD_RES (12)..(12): Norleucine
  C-term NH2
LTFAHYWAQLAL

SEQ ID NO: 1014 - protein, 12 aa, Artificial Sequence
  Description of Artificial Sequence: Synthetic peptide
  N-term Ac
  MOD_RES (4)..(4): Alpha-Me R8-octenyl-alanine olefin amino acid connected by an all-carbon crosslinker comprising one double bond
  misc_feature (4)..(11): Crosslink between residues
  MOD_RES (11)..(11): Alpha-Me S5-pentenyl-alanine olefin amino acid connected by an all-carbon crosslinker comprising one double bond
  C-term NH2
LTFAHYWAQLAV

SEQ ID NO: 1015 - protein, 12 aa, Artificial Sequence
  Description of Artificial Sequence: Synthetic peptide
  N-term Ac
  MOD_RES (4)..(4): Alpha-Me R8-octenyl-alanine olefin amino acid connected by an all-carbon crosslinker comprising one double bond
  misc_feature (4)..(11): Crosslink between residues
  MOD_RES (11)..(11): Alpha-Me S5-pentenyl-alanine olefin amino acid connected by an all-carbon crosslinker comprising one double bond
  C-term NH2
LTFAHYWAQLAF

SEQ ID NO: 1016 - protein, 12 aa, Artificial Sequence
  Description of Artificial Sequence: Synthetic peptide
  N-term Ac
  MOD_RES (4)..(4): Alpha-Me R8-octenyl-alanine olefin amino acid connected by an all-carbon crosslinker comprising one double bond
  misc_feature (4)..(11): Crosslink between residues
  MOD_RES (11)..(11): Alpha-Me S5-pentenyl-alanine olefin amino acid connected by an all-carbon crosslinker comprising one double bond
  C-term NH2
LTFAHYWAQLAW

SEQ ID NO: 1017 - protein, 12 aa, Artificial Sequence
  Description of Artificial Sequence: Synthetic peptide
  N-term Ac
  MOD_RES (4)..(4): Alpha-Me R8-octenyl-alanine olefin amino acid connected by an all-carbon crosslinker comprising one double bond
  misc_feature (4)..(11): Crosslink between residues
  MOD_RES (11)..(11): Alpha-Me S5-pentenyl-alanine olefin amino acid connected by an all-carbon crosslinker comprising one double bond
  C-term NH2
LTFAHYWAQLAR

SEQ ID NO: 1018 - protein, 12 aa, Artificial Sequence
  Description of Artificial Sequence: Synthetic peptide
  N-term Ac
  MOD_RES (4)..(4): Alpha-Me R8-octenyl-alanine olefin amino acid connected by an all-carbon crosslinker comprising one double bond
  misc_feature (4)..(11): Crosslink between residues
  MOD_RES (11)..(11): Alpha-Me S5-pentenyl-alanine olefin amino acid connected by an all-carbon crosslinker comprising one double bond
  C-term NH2
LTFAHYWAQLAK

SEQ ID NO: 1019 - protein, 16 aa, Artificial Sequence
  Description of Artificial Sequence: Synthetic peptide
  N-term Ac
  MOD_RES (2)..(2): Alpha-Me R8-octenyl-alanine olefin amino acid connected by an all-carbon crosslinker comprising one double bond
  misc_feature (2)..(9): Crosslink between residues
  MOD_RES (9)..(9): Alpha-Me S5-pentenyl-alanine olefin amino acid connected by an all-carbon crosslinker comprising one double bond
  MOD_RES (14)..(14): 2-aminoisobutyric acid
  C-term NH2
QAQQTFSNAWRLLXQN

SEQ ID NO: 1020 - protein, 16 aa, Artificial Sequence
  Description of Artificial Sequence: Synthetic peptide
  N-term Ac
  MOD_RES (5)..(5): Alpha-Me R8-octenyl-alanine olefin amino acid connected by an all-carbon crosslinker comprising one double bond
  misc_feature (5)..(12): Crosslink between residues
  MOD_RES (12)..(12): Alpha-Me S5-pentenyl-alanine olefin amino acid connected by an all-carbon crosslinker comprising one double bond
  MOD_RES (14)..(14): 2-aminoisobutyric acid
  C-term NH2
QSQQAFSNLWRALXQN

SEQ ID NO: 1021 - protein, 12 aa, Artificial Sequence
  Description of Artificial Sequence: Synthetic peptide
  N-term Ac
  MOD_RES (3)..(3): 2Pal
  MOD_RES (4)..(4): Alpha-Me R8-octenyl-alanine olefin amino acid connected by an all-carbon crosslinker comprising one double bond
  misc_feature (4)..(11): Crosslink between residues
  MOD_RES (11)..(11): Alpha-Me S5-pentenyl-alanine olefin amino acid connected by an all-carbon crosslinker comprising one double bond
  C-term NH2
LTAAHYWAQLAS

SEQ ID NO: 1022 - protein, 12 aa, Artificial Sequence
  Description of Artificial Sequence: Synthetic peptide
  N-term Ac
  MOD_RES (3)..(3): 3Pal
  MOD_RES (4)..(4): Alpha-Me R8-octenyl-alanine olefin amino acid connected by an all-carbon crosslinker comprising one double bond
  misc_feature (4)..(11): Crosslink between residues
  MOD_RES (11)..(11): Alpha-Me S5-pentenyl-alanine olefin amino acid connected by an all-carbon crosslinker comprising one double bond
  C-term NH2
LTAAHYWAQLAS

SEQ ID NO: 1023 - protein, 12 aa, Artificial Sequence
  Description of Artificial Sequence: Synthetic peptide
  N-term Ac
  MOD_RES (3)..(3): 4Pal
  MOD_RES (4)..(4): Alpha-Me R8-octenyl-alanine olefin amino acid connected by an all-carbon crosslinker comprising one double bond
  misc_feature (4)..(11): Crosslink between residues
  MOD_RES (11)..(11): Alpha-Me S5-pentenyl-alanine olefin amino acid connected by an all-carbon crosslinker comprising one double bond
  C-term NH2
LTAAHYWAQLAS

SEQ ID NO: 1024 - protein, 12 aa, Artificial Sequence
  Description of Artificial Sequence: Synthetic peptide
  N-term Ac
  MOD_RES (3)..(3): Phe-2CF3
  MOD_RES (4)..(4): Alpha-Me R8-octenyl-alanine olefin amino acid connected by an all-carbon crosslinker comprising one double bond
  misc_feature (4)..(11): Crosslink between residues
  MOD_RES (11)..(11): Alpha-Me S5-pentenyl-alanine olefin amino acid connected by an all-carbon crosslinker comprising one double bond
  C-term NH2
LTFAHYWAQLAS

SEQ ID NO: 1025 - protein, 12 aa, Artificial Sequence
  Description of Artificial Sequence: Synthetic peptide
  N-term Ac
  MOD_RES (3)..(3): Phe-2CN
  MOD_RES (4)..(4): Alpha-Me R8-octenyl-alanine olefin amino acid connected by an all-carbon crosslinker comprising one double bond
  misc_feature (4)..(11): Crosslink between residues
  MOD_RES (11)..(11): Alpha-Me S5-pentenyl-alanine olefin amino acid connected by an all-carbon crosslinker comprising one double bond
  C-term NH2
LTFAHYWAQLAS

SEQ ID NO: 1026 - protein, 12 aa, Artificial Sequence
  Description of Artificial Sequence: Synthetic peptide
  N-term Ac
  MOD_RES (3)..(3): Phe-2Me
  MOD_RES (4)..(4): Alpha-Me R8-octenyl-alanine olefin amino acid connected by an all-carbon crosslinker comprising one double bond
  misc_feature (4)..(11): Crosslink between residues
  MOD_RES (11)..(11): Alpha-Me S5-pentenyl-alanine olefin amino acid connected by an all-carbon crosslinker comprising one double bond
  C-term NH2
LTFAHYWAQLAS

SEQ ID NO: 1027 - protein, 12 aa, Artificial Sequence
  Description of Artificial Sequence: Synthetic peptide
  N-term Ac
  MOD_RES (3)..(3): 3-Chloro-Phe
  MOD_RES (4)..(4): Alpha-Me R8-octenyl-alanine olefin amino acid connected by an all-carbon crosslinker comprising one double bond
  misc_feature (4)..(11): Crosslink between residues
  MOD_RES (11)..(11): Alpha-Me S5-pentenyl-alanine olefin amino acid connected by an all-carbon crosslinker comprising one double bond
  C-term NH2
LTFAHYWAQLAS

SEQ ID NO: 1028 - protein, 12 aa, Artificial Sequence
  Description of Artificial Sequence: Synthetic peptide
  N-term Ac
  MOD_RES (3)..(3): D-Phe-4CF3
  MOD_RES (4)..(4): Alpha-Me R8-octenyl-alanine olefin amino acid connected by an all-carbon crosslinker comprising one double bond
  misc_feature (4)..(11): Crosslink between residues
  MOD_RES (11)..(11): Alpha-Me S5-pentenyl-alanine olefin amino acid connected by an all-carbon crosslinker comprising one double bond
  C-term NH2
LTFAHYWAQLAS

SEQ ID NO: 1029 - protein, 12 aa, Artificial Sequence
  Description of Artificial Sequence: Synthetic peptide
  N-term Ac
  MOD_RES (3)..(3): Phe-4tBu
  MOD_RES (4)..(4): Alpha-Me R8-octenyl-alanine olefin amino acid connected by an all-carbon crosslinker comprising one double bond
  misc_feature (4)..(11): Crosslink between residues
  MOD_RES (11)..(11): Alpha-Me S5-pentenyl-alanine olefin amino acid connected by an all-carbon crosslinker comprising one double bond
  C-term NH2
LTFAHYWAQLAS

SEQ ID NO: 1030 - protein, 12 aa, Artificial Sequence
  Description of Artificial Sequence: Synthetic peptide
  N-term Ac
  MOD_RES (3)..(3): Phe-5F
  MOD_RES (4)..(4): Alpha-Me R8-octenyl-alanine olefin amino acid connected by an all-carbon crosslinker comprising one double bond
  misc_feature (4)..(11): Crosslink between residues
  MOD_RES (11)..(11): Alpha-Me S5-pentenyl-alanine olefin amino acid connected by an all-carbon crosslinker comprising one double bond
  C-term NH2
LTFAHYWAQLAS

SEQ ID NO: 1031 - protein, 13 aa, Artificial Sequence
  Description of Artificial Sequence: Synthetic peptide
  N-term Ac
  MOD_RES (4)..(4): Alpha-Me R8-octenyl-alanine olefin amino acid connected by an all-carbon crosslinker comprising one double bond
  misc_feature (4)..(12): Crosslink between residues
  MOD_RES (7)..(7): 3Bth
  MOD_RES (12)..(12): Alpha-Me S5-pentenyl-alanine olefin amino acid connected by an all-carbon crosslinker comprising one double bond
  C-term NH2
LTFAHYXAAQLAS

SEQ ID NO: 1032 - protein, 12 aa, Artificial Sequence
  Description of Artificial Sequence: Synthetic peptide
  N-term Ac
  MOD_RES (3)..(3): Phe-2Br
  MOD_RES (4)..(4): Alpha-Me R8-octenyl-alanine olefin amino acid connected by an all-carbon crosslinker comprising one double bond
  misc_feature (4)..(11): Crosslink between residues
  MOD_RES (11)..(11): Alpha-Me S5-pentenyl-alanine olefin amino acid connected by an all-carbon crosslinker comprising one double bond
  C-term NH2
LTFAHYWAQLAS

SEQ ID NO: 1033 - protein, 12 aa, Artificial Sequence
  Description of Artificial Sequence: Synthetic peptide
  N-term Ac
  MOD_RES (3)..(3): Phe-4Br
  MOD_RES (4)..(4): Alpha-Me R8-octenyl-alanine olefin amino acid connected by an all-carbon crosslinker comprising one double bond
  misc_feature (4)..(11): Crosslink between residues
  MOD_RES (11)..(11): Alpha-Me S5-pentenyl-alanine olefin amino acid connected by an all-carbon crosslinker comprising one double bond
  C-term NH2
LTFAHYWAQLAS

SEQ ID NO: 1034 - protein, 12 aa, Artificial Sequence
  Description of Artificial Sequence: Synthetic peptide
  N-term Ac
  MOD_RES (3)..(3): Phe-2Cl
  MOD_RES (4)..(4): Alpha-Me R8-octenyl-alanine olefin amino acid connected by an all-carbon crosslinker comprising one double bond
  misc_feature (4)..(11): Crosslink between residues
  MOD_RES (11)..(11): Alpha-Me S5-pentenyl-alanine olefin amino acid connected by an all-carbon crosslinker comprising one double bond
  C-term NH2
LTFAHYWAQLAS

SEQ ID NO: 1035 - protein, 12 aa, Artificial Sequence
  Description of Artificial Sequence: Synthetic peptide
  N-term Ac
  MOD_RES (3)..(3): Phe-4Cl
  MOD_RES (4)..(4): Alpha-Me R8-octenyl-alanine olefin amino acid connected by an all-carbon crosslinker comprising one double bond
  misc_feature (4)..(11): Crosslink between residues
  MOD_RES (11)..(11): Alpha-Me S5-pentenyl-alanine olefin amino acid connected by an all-carbon crosslinker comprising one double bond
  C-term NH2
LTFAHYWAQLAS

SEQ ID NO: 1036 - protein, 12 aa, Artificial Sequence
  Description of Artificial Sequence: Synthetic peptide
  N-term Ac
  MOD_RES (3)..(3): Phe-3CN
  MOD_RES (4)..(4): Alpha-Me R8-octenyl-alanine olefin amino acid connected by an all-carbon crosslinker comprising one double bond
  misc_feature (4)..(11): Crosslink between residues
  MOD_RES (11)..(11): Alpha-Me S5-pentenyl-alanine olefin amino acid connected by an all-carbon crosslinker comprising one double bond
  C-term NH2
LTFAHYWAQLAS

SEQ ID NO: 1037 - protein, 12 aa, Artificial Sequence
  Description of Artificial Sequence: Synthetic peptide
  N-term Ac
  MOD_RES (3)..(3): Phe-4CN
  MOD_RES (4)..(4): Alpha-Me R8-octenyl-alanine olefin amino acid connected by an all-carbon crosslinker comprising one double bond
  misc_feature (4)..(11): Crosslink between residues
  MOD_RES (11)..(11): Alpha-Me S5-pentenyl-alanine olefin amino acid connected by an all-carbon crosslinker comprising one double bond
  C-term NH2
LTFAHYWAQLAS

SEQ ID NO: 1038 - protein, 12 aa, Artificial Sequence
  Description of Artificial Sequence: Synthetic peptide
  N-term Ac
  MOD_RES (3)..(3): Phe-34Cl2
  MOD_RES (4)..(4): Alpha-Me R8-octenyl-alanine olefin amino acid connected by an all-carbon crosslinker comprising one double bond
  misc_feature (4)..(11): Crosslink between residues
  MOD_RES (11)..(11): Alpha-Me S5-pentenyl-alanine olefin amino acid connected by an all-carbon crosslinker comprising one double bond
  C-term NH2
LTFAHYWAQLAS

SEQ ID NO: 1039 - protein, 12 aa, Artificial Sequence
  Description of Artificial Sequence: Synthetic peptide
  N-term Ac
  MOD_RES (3)..(3): 3,4-difluoro Phe
  MOD_RES (4)..(4): Alpha-Me R8-octenyl-alanine olefin amino acid connected by an all-carbon crosslinker comprising one double bond
  misc_feature (4)..(11): Crosslink between residues
  MOD_RES (11)..(11): Alpha-Me S5-pentenyl-alanine olefin amino acid connected by an all-carbon crosslinker comprising one double bond
  C-term NH2
LTFAHYWAQLAS

SEQ ID NO: 1040 - protein, 12 aa, Artificial Sequence
  Description of Artificial Sequence: Synthetic peptide
  N-term Ac
  MOD_RES (3)..(3): 3,5-difluoro-Phe
  MOD_RES (4)..(4): Alpha-Me R8-octenyl-alanine olefin amino acid connected by an all-carbon crosslinker comprising one double bond
  misc_feature (4)..(11): Crosslink between residues
  MOD_RES (11)..(11): Alpha-Me S5-pentenyl-alanine olefin amino acid connected by an all-carbon crosslinker comprising one double bond
  C-term NH2
LTFAHYWAQLAS

SEQ ID NO: 1041 - protein, 12 aa, Artificial Sequence
  Description of Artificial Sequence: Synthetic peptide
  N-term Ac
  MOD_RES (3)..(3): 3,3-di-Phe
  MOD_RES (4)..(4): Alpha-Me R8-octenyl-alanine olefin amino acid connected by an all-carbon crosslinker comprising one double bond
  misc_feature (4)..(11): Crosslink between residues
  MOD_RES (11)..(11): Alpha-Me S5-pentenyl-alanine olefin amino acid connected by an all-carbon crosslinker comprising one double bond
  C-term NH2
LTFAHYWAQLAS

SEQ ID NO: 1042 - protein, 12 aa, Artificial Sequence
  Description of Artificial Sequence: Synthetic peptide
  N-term Ac
  MOD_RES (3)..(3): 2-Fluoro-Phe
  MOD_RES (4)..(4): Alpha-Me R8-octenyl-alanine olefin amino acid connected by an all-carbon crosslinker comprising one double bond
  misc_feature (4)..(11): Crosslink between residues
  MOD_RES (11)..(11): Alpha-Me S5-pentenyl-alanine olefin amino acid connected by an all-carbon crosslinker comprising one double bond
  C-term NH2
LTFAHYWAQLAS

SEQ ID NO: 1043 - protein, 12 aa, Artificial Sequence
  Description of Artificial Sequence: Synthetic peptide
  N-term Ac
  MOD_RES (3)..(3): 3-fluoro-Phe
  MOD_RES (4)..(4): Alpha-Me R8-octenyl-alanine olefin amino acid connected by an all-carbon crosslinker comprising one double bond
  misc_feature (4)..(11): Crosslink between residues
  MOD_RES (11)..(11): Alpha-Me S5-pentenyl-alanine olefin amino acid connected by an all-carbon crosslinker comprising one double bond
  C-term NH2
LTFAHYWAQLAS

SEQ ID NO: 1044 - protein, 12 aa, Artificial Sequence
  Description of Artificial Sequence: Synthetic peptide
  N-term Ac
  MOD_RES (3)..(3): Phe-4F
  MOD_RES (4)..(4): Alpha-Me R8-octenyl-alanine olefin amino acid connected by an all-carbon crosslinker comprising one double bond
  misc_feature (4)..(11): Crosslink between residues
  MOD_RES (11)..(11): Alpha-Me S5-pentenyl-alanine olefin amino acid connected by an all-carbon crosslinker comprising one double bond
  C-term NH2
LTFAHYWAQLAS

SEQ ID NO: 1045 - protein, 12 aa, Artificial Sequence
  Description of Artificial Sequence: Synthetic peptide
  N-term Ac
  MOD_RES (3)..(3): 4-iodo-Phe
  MOD_RES (4)..(4): Alpha-Me R8-octenyl-alanine olefin amino acid connected by an all-carbon crosslinker comprising one double bond
  misc_feature (4)..(11): Crosslink between residues
  MOD_RES (11)..(11): Alpha-Me S5-pentenyl-alanine olefin amino acid connected by an all-carbon crosslinker comprising one double bond
  C-term NH2
LTFAHYWAQLAS

SEQ ID NO: 1046 - protein, 12 aa, Artificial Sequence
  Description of Artificial Sequence: Synthetic peptide
  N-term Ac
  MOD_RES (3)..(3): Phe-3Me
  MOD_RES (4)..(4): Alpha-Me R8-octenyl-alanine olefin amino acid connected by an all-carbon crosslinker comprising one double bond
  misc_feature (4)..(11): Crosslink between residues
  MOD_RES (11)..(11): Alpha-Me S5-pentenyl-alanine olefin amino acid connected by an all-carbon crosslinker comprising one double bond
  C-term NH2
LTFAHYWAQLAS

SEQ ID NO: 1047 - protein, 12 aa, Artificial Sequence
  Description of Artificial Sequence: Synthetic peptide
  N-term Ac
  MOD_RES (3)..(3): Phe-4Me
  MOD_RES (4)..(4): Alpha-Me R8-octenyl-alanine olefin amino acid connected by an all-carbon crosslinker comprising one double bond
  misc_feature (4)..(11): Crosslink between residues
  MOD_RES (11)..(11): Alpha-Me S5-pentenyl-alanine olefin amino acid connected by an all-carbon crosslinker comprising one double bond
  C-term NH2
LTFAHYWAQLAS

SEQ ID NO: 1048 - protein, 12 aa, Artificial Sequence
  Description of Artificial Sequence: Synthetic peptide
  N-term Ac
  MOD_RES (3)..(3): 1-Naphthalanine
  MOD_RES (4)..(4): Alpha-Me R8-octenyl-alanine olefin amino acid connected by an all-carbon crosslinker comprising one double bond
  misc_feature (4)..(11): Crosslink between residues
  MOD_RES (11)..(11): Alpha-Me S5-pentenyl-alanine olefin amino acid connected by an all-carbon crosslinker comprising one double bond
  C-term NH2
LTAAHYWAQLAS

SEQ ID NO: 1049 - protein, 12 aa, Artificial Sequence
  Description of Artificial Sequence: Synthetic peptide
  N-term Ac
  MOD_RES (3)..(3): 2-Naphthalanine
  MOD_RES (4)..(4): Alpha-Me R8-octenyl-alanine olefin amino acid connected by an all-carbon crosslinker comprising one double bond
  misc_feature (4)..(11): Crosslink between residues
  MOD_RES (11)..(11): Alpha-Me S5-pentenyl-alanine olefin amino acid connected by an all-carbon crosslinker comprising one double bond
  C-term NH2
LTAAHYWAQLAS

SEQ ID NO: 1050 - protein, 12 aa, Artificial Sequence
  Description of Artificial Sequence: Synthetic peptide
  N-term Ac
  MOD_RES (3)..(3): Phe-3CF3
  MOD_RES (4)..(4): Alpha-Me R8-octenyl-alanine olefin amino acid connected by an all-carbon crosslinker comprising one double bond
  misc_feature (4)..(11): Crosslink between residues
  MOD_RES (11)..(11): Alpha-Me S5-pentenyl-alanine olefin amino acid connected by an all-carbon crosslinker comprising one double bond
  C-term NH2
LTFAHYWAQLAS

SEQ ID NO: 1051 - protein, 12 aa, Artificial Sequence
  Description of Artificial Sequence: Synthetic peptide
  N-term Ac
  MOD_RES (3)..(3): Phe-4NO2
  MOD_RES (4)..(4): Alpha-Me R8-octenyl-alanine olefin amino acid connected by an all-carbon crosslinker comprising one double bond
  misc_feature (4)..(11): Crosslink between residues
  MOD_RES (11)..(11): Alpha-Me S5-pentenyl-alanine olefin amino acid connected by an all-carbon crosslinker comprising one double bond
  C-term NH2
LTFAHYWAQLAS

SEQ ID NO: 1052 - protein, 12 aa, Artificial Sequence
  Description of Artificial Sequence: Synthetic peptide
  N-term Ac
  MOD_RES (3)..(3): Phe-3NO2
  MOD_RES (4)..(4): Alpha-Me R8-octenyl-alanine olefin amino acid connected by an all-carbon crosslinker comprising one double bond
  misc_feature (4)..(11): Crosslink between residues
  MOD_RES (11)..(11): Alpha-Me S5-pentenyl-alanine olefin amino acid connected by an all-carbon crosslinker comprising one double bond
  C-term NH2
LTFAHYWAQLAS

SEQ ID NO: 1053 - protein, 12 aa, Artificial Sequence
  Description of Artificial Sequence: Synthetic peptide
  N-term Ac
  MOD_RES (4)..(4): Alpha-Me R8-octenyl-alanine olefin amino acid connected by an all-carbon crosslinker comprising one double bond
  misc_feature (4)..(11): Crosslink between residues
  MOD_RES (5)..(5): 2Thi
  MOD_RES (11)..(11): Alpha-Me S5-pentenyl-alanine olefin amino acid connected by an all-carbon crosslinker comprising one double bond
  C-term NH2
LTFAXYWAQLAS

SEQ ID NO: 1054 - protein, 12 aa, Artificial Sequence
  Description of Artificial Sequence: Synthetic peptide
  N-term Ac
  MOD_RES (4)..(4): Alpha-Me R8-octenyl-alanine olefin amino acid connected by an all-carbon crosslinker comprising one double bond
  misc_feature (4)..(11): Crosslink between residues
  MOD_RES (6)..(6): Bi-Phe
  MOD_RES (11)..(11): Alpha-Me S5-pentenyl-alanine olefin amino acid connected by an all-carbon crosslinker comprising one double bond
  C-term NH2
LTFAHFWAQLAS

SEQ ID NO: 1055 - protein, 12 aa, Artificial Sequence
  Description of Artificial Sequence: Synthetic peptide
  N-term Ac
  MOD_RES (4)..(4): Alpha-Me R8-octenyl-alanine olefin amino acid connected by an all-carbon crosslinker comprising one double bond
  misc_feature (4)..(11): Crosslink between residues
  MOD_RES (6)..(6): Phe-4tBu
  MOD_RES (11)..(11): Alpha-Me S5-pentenyl-alanine olefin amino acid connected by an all-carbon crosslinker comprising one double bond
  C-term NH2
LTFAHFWAQLAS

SEQ ID NO: 1056 - protein, 12 aa, Artificial Sequence
  Description of Artificial Sequence: Synthetic peptide
  N-term Ac
  MOD_RES (4)..(4): Alpha-Me R8-octenyl-alanine olefin amino acid connected by an all-carbon crosslinker comprising one double bond
  misc_feature (4)..(11): Crosslink between residues
  MOD_RES (6)..(6): D-Phe-4CF3
  MOD_RES (11)..(11): Alpha-Me S5-pentenyl-alanine olefin amino acid connected by an all-carbon crosslinker comprising one double bond
  C-term NH2
LTFAHFWAQLAS

SEQ ID NO: 1057 - protein, 12 aa, Artificial Sequence
  Description of Artificial Sequence: Synthetic peptide
  N-term Ac
  MOD_RES (4)..(4): Alpha-Me R8-octenyl-alanine olefin amino acid connected by an all-carbon crosslinker comprising one double bond
  misc_feature (4)..(11): Crosslink between residues
  MOD_RES (6)..(6): Phe-4Cl
  MOD_RES (11)..(11): Alpha-Me S5-pentenyl-alanine olefin amino acid connected by an all-carbon crosslinker comprising one double bond
  C-term NH2
LTFAHFWAQLAS

SEQ ID NO: 1058 - protein, 12 aa, Artificial Sequence
  Description of Artificial Sequence: Synthetic peptide
  N-term Ac
  MOD_RES (4)..(4): Alpha-Me R8-octenyl-alanine olefin amino acid connected by an all-carbon crosslinker comprising one double bond
  misc_feature (4)..(11): Crosslink between residues
  MOD_RES (6)..(6): Phe-4Me
  MOD_RES (11)..(11): Alpha-Me S5-pentenyl-alanine olefin amino acid connected by an all-carbon crosslinker comprising one double bond
  C-term NH2
LTFAHFWAQLAS

SEQ ID NO: 1059 - protein, 12 aa, Artificial Sequence
  Description of Artificial Sequence: Synthetic peptide
  N-term Ac
  MOD_RES (4)..(4): Alpha-Me R8-octenyl-alanine olefin amino acid connected by an all-carbon crosslinker comprising one double bond
  misc_feature (4)..(11): Crosslink between residues
  MOD_RES (6)..(6): Phe-4Br
  MOD_RES (11)..(11): Alpha-Me S5-pentenyl-alanine olefin amino acid connected by an all-carbon crosslinker comprising one double bond
  C-term NH2
LTFAHFWAQLAS

SEQ ID NO: 1060 - protein, 12 aa, Artificial Sequence
  Description of Artificial Sequence: Synthetic peptide
  N-term Ac
  MOD_RES (4)..(4): Alpha-Me R8-octenyl-alanine olefin amino acid connected by an all-carbon crosslinker comprising one double bond
  misc_feature (4)..(11): Crosslink between residues
  MOD_RES (6)..(6): Phe-4CN
  MOD_RES (11)..(11): Alpha-Me S5-pentenyl-alanine olefin amino acid connected by an all-carbon crosslinker comprising one double bond
  C-term NH2
LTFAHFWAQLAS

SEQ ID NO: 1061 - protein, 12 aa, Artificial Sequence
  Description of Artificial Sequence: Synthetic peptide
  N-term Ac
  MOD_RES (4)..(4): Alpha-Me R8-octenyl-alanine olefin amino acid connected by an all-carbon crosslinker comprising one double bond
  misc_feature (4)..(11): Crosslink between residues
  MOD_RES (6)..(6): Phe-4NO2
  MOD_RES (11)..(11): Alpha-Me S5-pentenyl-alanine olefin amino acid connected by an all-carbon crosslinker comprising one double bond
  C-term NH2
LTFAHFWAQLAS

SEQ ID NO: 1062 - protein, 12 aa, Artificial Sequence
  Description of Artificial Sequence: Synthetic peptide
  N-term Ac
  MOD_RES (4)..(4): Alpha-Me R8-octenyl-alanine olefin amino acid connected by an all-carbon crosslinker comprising one double bond
  misc_feature (4)..(11): Crosslink between residues
  MOD_RES (6)..(6): 1-Naphthalanine
  MOD_RES (11)..(11): Alpha-Me S5-pentenyl-alanine olefin amino acid connected by an all-carbon crosslinker comprising one double bond
  C-term NH2
LTFAHAWAQLAS

SEQ ID NO: 1063 - protein, 12 aa, Artificial Sequence
  Description of Artificial Sequence: Synthetic peptide
  N-term Ac
  MOD_RES (4)..(4): Alpha-Me R8-octenyl-alanine olefin amino acid connected by an all-carbon crosslinker comprising one double bond
  misc_feature (4)..(11): Crosslink between residues
  MOD_RES (6)..(6): 2-Naphthalanine
  MOD_RES (11)..(11): Alpha-Me S5-pentenyl-alanine olefin amino acid connected by an all-carbon crosslinker comprising one double bond
  C-term NH2
LTFAHAWAQLAS

SEQ ID NO: 1064 - protein, 11 aa, Artificial Sequence
  Description of Artificial Sequence: Synthetic peptide
  N-term Ac
  MOD_RES (4)..(4): Alpha-Me R8-octenyl-alanine olefin amino acid connected by an all-carbon crosslinker comprising one double bond
  misc_feature (4)..(10): Crosslink between residues
  MOD_RES (10)..(10): Alpha-Me S5-pentenyl-alanine olefin amino acid connected by an all-carbon crosslinker comprising one double bond
  C-term NH2
LTFAHWAQLAS

SEQ ID NO: 1065 - protein, 12 aa, Artificial Sequence
  Description of Artificial Sequence: Synthetic peptide
  N-term Ac
  MOD_RES (4)..(4): Alpha-Me R8-octenyl-alanine olefin amino acid connected by an all-carbon crosslinker comprising one double bond
  misc_feature (4)..(11): Crosslink between residues
  MOD_RES (7)..(7): 1-Naphthalanine
  MOD_RES (11)..(11): Alpha-Me S5-pentenyl-alanine olefin amino acid connected by an all-carbon crosslinker comprising one double bond
  C-term NH2
LTFAHYAAQLAS

SEQ ID NO: 1066 - protein, 12 aa, Artificial Sequence
  Description of Artificial Sequence: Synthetic peptide
  N-term Ac
  MOD_RES (4)..(4): Alpha-Me R8-octenyl-alanine olefin amino acid connected by an all-carbon crosslinker comprising one double bond
  misc_feature (4)..(11): Crosslink between residues
  MOD_RES (7)..(7): 2-Naphthalanine
  MOD_RES (11)..(11): Alpha-Me S5-pentenyl-alanine olefin amino acid connected by an all-carbon crosslinker comprising one double bond
  C-term NH2
LTFAHYAAQLAS

SEQ ID NO: 1067 - protein, 12 aa, Artificial Sequence
  Description of Artificial Sequence: Synthetic peptide
  N-term Ac
  MOD_RES (4)..(4): Alpha-Me R8-octenyl-alanine olefin amino acid connected by an all-carbon crosslinker comprising one double bond
  misc_feature (4)..(11): Crosslink between residues
  MOD_RES (11)..(11): Alpha-Me S5-pentenyl-alanine olefin amino acid connected by an all-carbon crosslinker comprising one double bond
  C-term NH2
LTFAHYWAQIAS

SEQ ID NO: 1068 - protein, 12 aa, Artificial Sequence
  Description of Artificial Sequence: Synthetic peptide
  N-term Ac
  MOD_RES (4)..(4): Alpha-Me R8-octenyl-alanine olefin amino acid connected by an all-carbon crosslinker comprising one double bond
  misc_feature (4)..(11): Crosslink between residues
  MOD_RES (10)..(10): Norleucine
  MOD_RES (11)..(11): Alpha-Me S5-pentenyl-alanine olefin amino acid connected by an all-carbon crosslinker comprising one double bond
  C-term NH2
LTFAHYWAQLAS

SEQ ID NO: 1069 - protein, 12 aa, Artificial Sequence
  Description of Artificial Sequence: Synthetic peptide
  N-term Ac
  MOD_RES (4)..(4): Alpha-Me R8-octenyl-alanine olefin amino acid connected by an all-carbon crosslinker comprising one E configured double bond
  misc_feature (4)..(11): Crosslink between residues
  MOD_RES (11)..(11): Alpha-Me S5-pentenyl-alanine olefin amino acid connected by an all-carbon crosslinker comprising one E configured double bond
  C-term NH2
LTFAHYWAQLAA

SEQ ID NO: 1070 - protein, 12 aa, Artificial Sequence
  Description of Artificial Sequence: Synthetic peptide
  N-term Ac
  MOD_RES (4)..(4): Alpha-Me R8-octenyl-alanine olefin amino acid connected by an all-carbon crosslinker comprising one double bond
  misc_feature (4)..(11): Crosslink between residues
  MOD_RES (11)..(11): Alpha-Me S5-pentenyl-alanine olefin amino acid connected by an all-carbon crosslinker comprising one double bond
  MOD_RES (12)..(12): Abu
  C-term NH2
LTFAHYWAQLAX

SEQ ID NO: 1071 - protein, 12 aa, Artificial Sequence
  Description of Artificial Sequence: Synthetic peptide
  N-term Ac
  MOD_RES (4)..(4): Alpha-Me R8-octenyl-alanine olefin amino acid connected by an all-carbon crosslinker comprising one double bond
  misc_feature (4)..(11): Crosslink between residues
  MOD_RES (8)..(8): Abu
  MOD_RES (11)..(11): Alpha-Me S5-pentenyl-alanine olefin amino acid connected by an all-carbon crosslinker comprising one double bond
  C-term NH2
LTFAHYWXQLAS

SEQ ID NO: 1072 - protein, 12 aa, Artificial Sequence
  Description of Artificial Sequence: Synthetic peptide
  N-term Ac
  MOD_RES (4)..(4): Alpha-Me R8-octenyl-alanine olefin amino acid connected by an all-carbon crosslinker comprising one double bond
  misc_feature (4)..(11): Crosslink between residues
  MOD_RES (11)..(11): Alpha-Me S5-pentenyl-alanine olefin amino acid connected by an all-carbon crosslinker comprising one double bond
  C-term NH2
LAFAHYWAQLAS

SEQ ID NO: 1073 - protein, 12 aa, Artificial Sequence
  Description of Artificial Sequence: Synthetic peptide
  N-term Ac
  MOD_RES (4)..(4): Alpha-Me R8-octenyl-alanine olefin amino acid connected by an all-carbon crosslinker comprising one double bond
  misc_feature (4)..(11): Crosslink between residues
  MOD_RES (9)..(9): Norleucine
  MOD_RES (11)..(11): Alpha-Me S5-pentenyl-alanine olefin amino acid connected by an all-carbon crosslinker comprising one double bond
  C-term NH2
LTFANLWALLAQ

SEQ ID NO: 1074 - protein, 12 aa, Artificial Sequence
  Description of Artificial Sequence: Synthetic peptide
  N-term Ac
  MOD_RES (4)..(4): Alpha-Me R8-octenyl-alanine olefin amino acid connected by an all-carbon crosslinker comprising one double bond
  misc_feature (4)..(11): Crosslink between residues
  MOD_RES (9)..(9): Norleucine
  MOD_RES (11)..(11): Alpha-Me S5-pentenyl-alanine olefin amino acid connected by an all-carbon crosslinker comprising one double bond
  C-term NH2
LTFAALWALLAQ

SEQ ID NO: 1075 - protein, 12 aa, Artificial Sequence
  Description of Artificial Sequence: Synthetic peptide
  N-term Ac
  MOD_RES (4)..(4): Alpha-Me R8-octenyl-alanine olefin amino acid connected by an all-carbon crosslinker comprising one double bond
  misc_feature (4)..(11): Crosslink between residues
  MOD_RES (9)..(9): Norleucine
  MOD_RES (11)..(11): Alpha-Me S5-pentenyl-alanine olefin amino acid connected by an all-carbon crosslinker comprising one double bond
  C-term NH2
LAFANLWALLAQ

SEQ ID NO: 1076 - protein, 10 aa, Artificial Sequence
  Description of Artificial Sequence: Synthetic peptide
  N-term Ac
  MOD_RES (2)..(2): Alpha-Me R8-octenyl-alanine olefin amino acid connected by an all-carbon crosslinker comprising one double bond
  misc_feature (2)..(9): Crosslink between residues
  MOD_RES (7)..(7): Ac3c
  MOD_RES (9)..(9): Alpha-Me S5-pentenyl-alanine olefin amino acid connected by an all-carbon crosslinker comprising one double bond
  C-term NH2
FAAYWAXLAA

SEQ ID NO: 1077 - protein, 12 aa, Artificial Sequence
  Description of Artificial Sequence: Synthetic peptide
  N-term Ac
  MOD_RES (4)..(4): Alpha-Me R8-octenyl-alanine olefin amino acid connected by an all-carbon crosslinker comprising one double bond
  misc_feature (4)..(11): Crosslink between residues
  MOD_RES (11)..(11): Alpha-Me S5-pentenyl-alanine olefin amino acid connected by an all-carbon crosslinker comprising one double bond
  C-term NH2
LTFAAYWAALAS

SEQ ID NO: 1078 - protein, 12 aa, Artificial Sequence
  Description of Artificial Sequence: Synthetic peptide
  N-term Ac
  MOD_RES (4)..(4): Alpha-Me R8-octenyl-alanine olefin amino acid connected by an all-carbon crosslinker comprising one double bond
  misc_feature (4)..(11): Crosslink between residues
  MOD_RES (11)..(11): Alpha-Me S5-pentenyl-alanine olefin amino acid connected by an all-carbon crosslinker comprising one double bond
  C-term NH2
LVFAAYWAQLAS

SEQ ID NO: 1079 - protein, 12 aa, Artificial Sequence
  Description of Artificial Sequence: Synthetic peptide
  N-term Ac
  MOD_RES (4)..(4): Alpha-Me R8-octenyl-alanine olefin amino acid connected by an all-carbon crosslinker comprising one double bond
  misc_feature (4)..(11): Crosslink between residues
  MOD_RES (8)..(8): Abu
  MOD_RES (11)..(11): Alpha-Me S5-pentenyl-alanine olefin amino acid connected by an all-carbon crosslinker comprising one double bond
  C-term NH2
LTFAAYWXQLAS

SEQ ID NO: 1080 - protein, 12 aa, Artificial Sequence
  Description of Artificial Sequence: Synthetic peptide
  N-term Ac
  MOD_RES (4)..(4): Alpha-Me R8-octenyl-alanine olefin amino acid connected by an all-carbon crosslinker comprising one double bond
  misc_feature (4)..(11): Crosslink between residues
  MOD_RES (8)..(8): Norleucine
  MOD_RES (11)..(11): Alpha-Me S5-pentenyl-alanine olefin amino acid connected by an all-carbon crosslinker comprising one double bond
  C-term NH2
LTFAAYWLQLAS

SEQ ID NO: 1081 - protein, 12 aa, Artificial Sequence
  Description of Artificial Sequence: Synthetic peptide
  N-term Ac
  MOD_RES (4)..(4): Alpha-Me R8-octenyl-alanine olefin amino acid connected by an all-carbon crosslinker comprising one double bond
  misc_feature (4)..(11): Crosslink between residues
  MOD_RES (5)..(5): Abu
  MOD_RES (11)..(11): Alpha-Me S5-pentenyl-alanine olefin amino acid connected by an all-carbon crosslinker comprising one double bond
  C-term NH2
LTFAXYWAQLAS

SEQ ID NO: 1082 - protein, 12 aa, Artificial Sequence
  Description of Artificial Sequence: Synthetic peptide
  N-term Ac
  MOD_RES (4)..(4): Alpha-Me R8-octenyl-alanine olefin amino acid connected by an all-carbon crosslinker comprising one double bond
  misc_feature (4)..(11): Crosslink between residues
  MOD_RES (11)..(11): Alpha-Me S5-pentenyl-alanine olefin amino acid connected by an all-carbon crosslinker comprising one double bond
  C-term NH2
LTFAAYWHQLAS

SEQ ID NO: 1083 - protein, 12 aa, Artificial Sequence
  Description of Artificial Sequence: Synthetic peptide
  N-term Ac
  MOD_RES (4)..(4): Alpha-Me R8-octenyl-alanine olefin amino acid connected by an all-carbon crosslinker comprising one double bond
  misc_feature (4)..(11): Crosslink between residues
  MOD_RES (11)..(11): Alpha-Me S5-pentenyl-alanine olefin amino acid connected by an all-carbon crosslinker comprising one double bond
  C-term NH2
LTFAAYWKQLAS

SEQ ID NO: 1084 - protein, 12 aa, Artificial Sequence
  Description of Artificial Sequence: Synthetic peptide
  N-term Ac
  MOD_RES (4)..(4): Alpha-Me R8-octenyl-alanine olefin amino acid connected by an all-carbon crosslinker comprising one double bond
  misc_feature (4)..(11): Crosslink between residues
  MOD_RES (8)..(8): Ornithine
  MOD_RES (11)..(11): Alpha-Me S5-pentenyl-alanine olefin amino acid connected by an all-carbon crosslinker comprising one double bond
  C-term NH2
LTFAAYWXQLAS

SEQ ID NO: 1085 - protein, 12 aa, Artificial Sequence
  Description of Artificial Sequence: Synthetic peptide
  N-term Ac
  MOD_RES (4)..(4): Alpha-Me R8-octenyl-alanine olefin amino acid connected by an all-carbon crosslinker comprising one double bond
  misc_feature (4)..(11): Crosslink between residues
  MOD_RES (11)..(11): Alpha-Me S5-pentenyl-alanine olefin amino acid connected by an all-carbon crosslinker comprising one double bond
  C-term NH2
LTFAAYWRQLAS

SEQ ID NO: 1086 - protein, 12 aa, Artificial Sequence
  Description of Artificial Sequence: Synthetic peptide
  N-term Ac
  MOD_RES (4)..(4): Alpha-Me R8-octenyl-alanine olefin amino acid connected by an all-carbon crosslinker comprising one double bond
  misc_feature (4)..(11): Crosslink between residues
  MOD_RES (11)..(11): Alpha-Me S5-pentenyl-alanine olefin amino acid connected by an all-carbon crosslinker comprising one double bond
  C-term NH2
LTFAAYWSQLAS

SEQ ID NO: 1087 - protein, 12 aa, Artificial Sequence
  Description of Artificial Sequence: Synthetic peptide
  N-term Ac
  MOD_RES (4)..(4): Alpha-Me R8-octenyl-alanine olefin amino acid connected by an all-carbon crosslinker comprising one double bond
  misc_feature (4)..(11): Crosslink between residues
  MOD_RES (11)..(11): Alpha-Me S5-pentenyl-alanine olefin amino acid connected by an all-carbon crosslinker comprising one double bond
  C-term NH2
LTFAAYWRALAS

SEQ ID NO: 1088 - protein, 12 aa, Artificial Sequence
  Description of Artificial Sequence: Synthetic peptide
  N-term Ac
  MOD_RES (4)..(4): Alpha-Me R8-octenyl-alanine olefin amino acid connected by an all-carbon crosslinker comprising one double bond
  misc_feature (4)..(11): Crosslink between residues
  MOD_RES (11)..(11): Alpha-Me S5-pentenyl-alanine olefin amino acid connected by an all-carbon crosslinker comprising one double bond
  C-term NH2
LTFAAYWRQLAA

SEQ ID NO: 1089 - protein, 12 aa, Artificial Sequence
  Description of Artificial Sequence: Synthetic peptide
  N-term Ac
  MOD_RES (4)..(4): Alpha-Me R8-octenyl-alanine olefin amino acid connected by an all-carbon crosslinker comprising one double bond
  misc_feature (4)..(11): Crosslink between residues
  MOD_RES (11)..(11): Alpha-Me S5-pentenyl-alanine olefin amino acid connected by an all-carbon crosslinker comprising one double bond
  C-term NH2
LTFAAYWRALAA

SEQ ID NO: 1090 - protein, 12 aa, Artificial Sequence
  Description of Artificial Sequence: Synthetic peptide
  N-term Ac
  MOD_RES (4)..(4): Alpha-Me R5-pentenyl-alanine olefin amino acid connected by an all-carbon crosslinker comprising one double bond
  misc_feature (4)..(11): Crosslink between residues
  MOD_RES (11)..(11): Alpha-Me S8-octenyl-alanine olefin amino acid connected by an all-carbon crosslinker comprising one double bond
  C-term NH2
LTFAHYWAQLAS

SEQ ID NO: 1091 - protein, 12 aa, Artificial Sequence
  Description of Artificial Sequence: Synthetic peptide
  N-term Ac
  MOD_RES (4)..(4): Alpha-Me S5-pentenyl-alanine olefin amino acid connected by an all-carbon crosslinker comprising one double bond
  misc_feature (4)..(11): Crosslink between residues
  MOD_RES (11)..(11): Alpha-Me R8-octenyl-alanine olefin amino acid connected by an all-carbon crosslinker comprising one double bond
  C-term NH2
LTFAHYWAQLAS

SEQ ID NO: 1092 - protein, 12 aa, Artificial Sequence
  Description of Artificial Sequence: Synthetic peptide
  N-term Ac
  MOD_RES (4)..(4): Alpha-Me R8-octenyl-alanine olefin amino acid connected by an all-carbon crosslinker comprising one double bond
  misc_feature (4)..(11): Crosslink between residues
  MOD_RES (11)..(11): Alpha-Me S5-pentenyl-alanine olefin amino acid connected by an all-carbon crosslinker comprising one double bond
  C-term NH2
LTFAHYWAALAS

SEQ ID NO: 1093 - protein, 12 aa, Artificial Sequence
  Description of Artificial Sequence: Synthetic peptide
  N-term Ac
  MOD_RES (4)..(4): Alpha-Me R8-octenyl-alanine olefin amino acid connected by an all-carbon crosslinker comprising one double bond
  misc_feature (4)..(11): Crosslink between residues
  MOD_RES (9)..(9): Abu
  MOD_RES (11)..(11): Alpha-Me S5-pentenyl-alanine olefin amino acid connected by an all-carbon crosslinker comprising one double bond
  C-term NH2
LTFAHYWAXLAS

SEQ ID NO: 1094 - protein, 12 aa, Artificial Sequence
  Description of Artificial Sequence: Synthetic peptide
  N-term Ac
  MOD_RES (4)..(4): Alpha-Me R8-octenyl-alanine olefin amino acid connected by an all-carbon crosslinker comprising one double bond
  misc_feature (4)..(11): Crosslink between residues
  MOD_RES (11)..(11): Alpha-Me S5-pentenyl-alanine olefin amino acid connected by an all-carbon crosslinker comprising one double bond
  C-term NH2
LTFAHYWALLAS

SEQ ID NO: 1095 - protein, 10 aa, Artificial Sequence
  Description of Artificial Sequence: Synthetic peptide
  N-term Ac
  MOD_RES (2)..(2): Alpha-Me R8-octenyl-alanine olefin amino acid connected by an all-carbon crosslinker comprising one double bond
  misc_feature (2)..(9): Crosslink between residues
  MOD_RES (9)..(9): Alpha-Me S5-pentenyl-alanine olefin amino acid connected by an all-carbon crosslinker comprising one double bond
  C-term NH2
FAAYWHALAA

SEQ ID NO: 1096 - protein, 10 aa, Artificial Sequence
  Description of Artificial Sequence: Synthetic peptide
  N-term Ac
  MOD_RES (2)..(2): Alpha-Me R8-octenyl-alanine olefin amino acid connected by an all-carbon crosslinker comprising one double bond
  misc_feature (2)..(9): Crosslink between residues
  MOD_RES (9)..(9): Alpha-Me S5-pentenyl-alanine olefin amino acid connected by an all-carbon crosslinker comprising one double bond
  C-term NH2
FAAYWAALAA

SEQ ID NO: 1097 - protein, 10 aa, Artificial Sequence
  Description of Artificial Sequence: Synthetic peptide
  N-term Ac
  MOD_RES (2)..(2): Alpha-Me R8-octenyl-alanine olefin amino acid connected by an all-carbon crosslinker comprising one double bond
  misc_feature (2)..(9): Crosslink between residues
  MOD_RES (9)..(9): Alpha-Me S5-pentenyl-alanine olefin amino acid connected by an all-carbon crosslinker comprising one double bond
  C-term NH2
FAAYWSALAA

SEQ ID NO: 1098 - protein, 10 aa, Artificial Sequence
  Description of Artificial Sequence: Synthetic peptide
  N-term Ac
  MOD_RES (2)..(2): Alpha-Me R8-octenyl-alanine olefin amino acid connected by an all-carbon crosslinker comprising one double bond
  misc_feature (2)..(9): Crosslink between residues
  MOD_RES (9)..(9): Alpha-Me S5-pentenyl-alanine olefin amino acid connected by an all-carbon crosslinker comprising one double bond
  C-term NH2
FAAYWRALAA

SEQ ID NO: 1099 - protein, 10 aa, Artificial Sequence
  Description of Artificial Sequence: Synthetic peptide
  N-term Ac
  MOD_RES (2)..(2): Alpha-Me R8-octenyl-alanine olefin amino acid connected by an all-carbon crosslinker comprising one double bond
  misc_feature (2)..(9): Crosslink between residues
  MOD_RES (9)..(9): Alpha-Me S5-pentenyl-alanine olefin amino acid connected by an all-carbon crosslinker comprising one double bond
  C-term NH2
FAAYWKALAA

SEQ ID NO: 1100 - protein, 10 aa, Artificial Sequence
  Description of Artificial Sequence: Synthetic peptide
  N-term Ac
  MOD_RES (2)..(2): Alpha-Me R8-octenyl-alanine olefin amino acid connected by an all-carbon crosslinker comprising one double bond
  misc_feature (2)..(9): Crosslink between residues
  MOD_RES (6)..(6): Ornithine
  MOD_RES (9)..(9): Alpha-Me S5-pentenyl-alanine olefin amino acid connected by an all-carbon crosslinker comprising one double bond
  C-term NH2
FAAYWXALAA

SEQ ID NO: 1101 - protein, 10 aa, Artificial Sequence
  Description of Artificial Sequence: Synthetic peptide
  N-term Ac
  MOD_RES (2)..(2): Alpha-Me R8-octenyl-alanine olefin amino acid connected by an all-carbon crosslinker comprising one double bond
  misc_feature (2)..(9): Crosslink between residues
  MOD_RES (7)..(7): Ac3c
  MOD_RES (9)..(9): Alpha-Me S5-pentenyl-alanine olefin amino acid connected by an all-carbon crosslinker comprising one double bond
  C-term NH2
FAVYWEXLAA

SEQ ID NO: 1102 - protein, 10 aa, Artificial Sequence
  Description of Artificial Sequence: Synthetic peptide
  N-term Ac
  MOD_RES (2)..(2): Alpha-Me R8-octenyl-alanine olefin amino acid connected by an all-carbon crosslinker comprising one double bond
  misc_feature (2)..(9): Crosslink between residues
  MOD_RES (7)..(7): Ac3c
  MOD_RES (9)..(9): Alpha-Me S5-pentenyl-alanine olefin amino acid connected by an all-carbon crosslinker comprising one double bond
  C-term NH2
FAFYWEXLAA

SEQ ID NO: 1103 - protein, 10 aa, Artificial Sequence
  Description of Artificial Sequence: Synthetic peptide
  N-term Ac
  MOD_RES (2)..(2): Alpha-Me R8-octenyl-alanine olefin amino acid connected by an all-carbon crosslinker comprising one double bond
  misc_feature (2)..(9): Crosslink between residues
  MOD_RES (7)..(7): Ac3c
  MOD_RES (9)..(9): Alpha-Me S5-pentenyl-alanine olefin amino acid connected by an all-carbon crosslinker comprising one double bond
  C-term NH2
FAWYWEXLAA

SEQ ID NO: 1104 - protein, 10 aa, Artificial Sequence
  Description of Artificial Sequence: Synthetic peptide
  N-term Ac
  MOD_RES (2)..(2): Alpha-Me R8-octenyl-alanine olefin amino acid connected by an all-carbon crosslinker comprising one double bond
  misc_feature (2)..(9): Crosslink between residues
  MOD_RES (7)..(7): Ac3c
  MOD_RES (9)..(9): Alpha-Me S5-pentenyl-alanine olefin amino acid connected by an all-carbon crosslinker comprising one double bond
  C-term NH2
FARYWEXLAA

SEQ ID NO: 1105 - protein, 10 aa, Artificial Sequence
  Description of Artificial Sequence: Synthetic peptide
  N-term Ac
  MOD_RES (2)..(2): Alpha-Me R8-octenyl-alanine olefin amino acid connected by an all-carbon crosslinker comprising one double bond
  misc_feature (2)..(9): Crosslink between residues
  MOD_RES (7)..(7): Ac3c
  MOD_RES (9)..(9): Alpha-Me S5-pentenyl-alanine olefin amino acid connected by an all-carbon crosslinker comprising one double bond
  C-term NH2
FAKYWEXLAA

SEQ ID NO: 1106 - protein, 10 aa, Artificial Sequence
  Description of Artificial Sequence: Synthetic peptide
  N-term Ac
  MOD_RES (2)..(2): Alpha-Me R8-octenyl-alanine olefin amino acid connected by an all-carbon crosslinker comprising one double bond
  misc_feature (2)..(9): Crosslink between residues
  MOD_RES (4)..(4): Norleucine
  MOD_RES (7)..(7): Ac3c
  MOD_RES (9)..(9): Alpha-Me S5-pentenyl-alanine olefin amino acid connected by an all-carbon crosslinker comprising one double bond
  C-term NH2
FAALWEXLAA

SEQ ID NO: 1107 - protein, 10 aa, Artificial Sequence
  Description of Artificial Sequence: Synthetic peptide
  N-term Ac
  MOD_RES (2)..(2): Alpha-Me R8-octenyl-alanine olefin amino acid connected by an all-carbon crosslinker comprising one double bond
  misc_feature (2)..(9): Crosslink between residues
  MOD_RES (7)..(7): Ac3c
  MOD_RES (9)..(9): Alpha-Me S5-pentenyl-alanine olefin amino acid connected by an all-carbon crosslinker comprising one double bond
  C-term NH2
FAAVWEXLAA

SEQ ID NO: 1108 - protein, 10 aa, Artificial Sequence
  Description of Artificial Sequence: Synthetic peptide
  N-term Ac
  MOD_RES (2)..(2): Alpha-Me R8-octenyl-alanine olefin amino acid connected by an all-carbon crosslinker comprising one double bond
  misc_feature (2)..(9): Crosslink between residues
  MOD_RES (7)..(7): Ac3c
  MOD_RES (9)..(9): Alpha-Me S5-pentenyl-alanine olefin amino acid connected by an all-carbon crosslinker comprising one double bond
  C-term NH2
FAAFWEXLAA

SEQ ID NO: 1109 - protein, 10 aa, Artificial Sequence
  Description of Artificial Sequence: Synthetic peptide
  N-term Ac
  MOD_RES (2)..(2): Alpha-Me R8-octenyl-alanine olefin amino acid connected by an all-carbon crosslinker comprising one double bond
  misc_feature (2)..(9): Crosslink between residues
  MOD_RES (7)..(7): Ac3c
  MOD_RES (9)..(9): Alpha-Me S5-pentenyl-alanine olefin amino acid connected by an all-carbon crosslinker comprising one double bond
  C-term NH2
FAAWWEXLAA

SEQ ID NO: 1110 - protein, 10 aa, Artificial Sequence
  Description of Artificial Sequence: Synthetic peptide
  N-term Ac
  MOD_RES (2)..(2): Alpha-Me R8-octenyl-alanine olefin amino acid connected by an all-carbon crosslinker comprising one double bond
  misc_feature (2)..(9): Crosslink between residues
  MOD_RES (7)..(7): Ac3c
  MOD_RES (9)..(9): Alpha-Me S5-pentenyl-alanine olefin amino acid connected by an all-carbon crosslinker comprising one double bond
  C-term NH2
FAARWEXLAA

SEQ ID NO: 1111 - protein, 10 aa, Artificial Sequence
  Description of Artificial Sequence: Synthetic peptide
  N-term Ac
  MOD_RES (2)..(2): Alpha-Me R8-octenyl-alanine olefin amino acid connected by an all-carbon crosslinker comprising one double bond
  misc_feature (2)..(9): Crosslink between residues
  MOD_RES (7)..(7): Ac3c
  MOD_RES (9)..(9): Alpha-Me S5-pentenyl-alanine olefin amino acid connected by an all-carbon crosslinker comprising one double bond
  C-term NH2
FAAKWEXLAA

SEQ ID NO: 1112 - protein, 10 aa, Artificial Sequence
  Description of Artificial Sequence: Synthetic peptide
  N-term Ac
  MOD_RES (2)..(2): Alpha-Me R8-octenyl-alanine olefin amino acid connected by an all-carbon crosslinker comprising one double bond
  misc_feature (2)..(9): Crosslink between residues
  MOD_RES (7)..(7): Ac3c
  MOD_RES (9)..(9): Alpha-Me S5-pentenyl-alanine olefin amino acid connected by an all-carbon crosslinker comprising one double bond
  C-term NH2
FAAYWVXLAA

SEQ ID NO: 1113 - protein, 10 aa, Artificial Sequence
  Description of Artificial Sequence: Synthetic peptide
  N-term Ac
  MOD_RES (2)..(2): Alpha-Me R8-octenyl-alanine olefin amino acid connected by an all-carbon crosslinker comprising one double bond
  misc_feature (2)..(9): Crosslink between residues
  MOD_RES (7)..(7): Ac3c
  MOD_RES (9)..(9): Alpha-Me S5-pentenyl-alanine olefin amino acid connected by an all-carbon crosslinker comprising one double bond
  C-term NH2
FAAYWFXLAA

SEQ ID NO: 1114 - protein, 10 aa, Artificial Sequence
  Description of Artificial Sequence: Synthetic peptide
  N-term Ac
  MOD_RES (2)..(2): Alpha-Me R8-octenyl-alanine olefin amino acid connected by an all-carbon crosslinker comprising one double bond
  misc_feature (2)..(9): Crosslink between residues
  MOD_RES (7)..(7): Ac3c
  MOD_RES (9)..(9): Alpha-Me S5-pentenyl-alanine olefin amino acid connected by an all-carbon crosslinker comprising one double bond
  C-term NH2
FAAYWWXLAA

SEQ ID NO: 1115 - protein, 10 aa, Artificial Sequence
  Description of Artificial Sequence: Synthetic peptide
  N-term Ac
  MOD_RES (2)..(2): Alpha-Me R8-octenyl-alanine olefin amino acid connected by an all-carbon crosslinker comprising one double bond
  misc_feature (2)..(9): Crosslink between residues
  MOD_RES (7)..(7): Ac3c
  MOD_RES (9)..(9): Alpha-Me S5-pentenyl-alanine olefin amino acid connected by an all-carbon crosslinker comprising one double bond
  C-term NH2
FAAYWRXLAA

SEQ ID NO: 1116 - protein, 10 aa, Artificial Sequence
  Description of Artificial Sequence: Synthetic peptide
  N-term Ac
  MOD_RES (2)..(2): Alpha-Me R8-octenyl-alanine olefin amino acid connected by an all-carbon crosslinker comprising one double bond
  misc_feature (2)..(9): Crosslink between residues
  MOD_RES (7)..(7): Ac3c
  MOD_RES (9)..(9): Alpha-Me S5-pentenyl-alanine olefin amino acid connected by an all-carbon crosslinker comprising one double bond
  C-term NH2
FAAYWKXLAA

SEQ ID NO: 1117 - protein, 10 aa, Artificial Sequence
  Description of Artificial Sequence: Synthetic peptide
  N-term Ac
  MOD_RES (2)..(2): Alpha-Me R8-octenyl-alanine olefin amino acid connected by an all-carbon crosslinker comprising one double bond
  misc_feature (2)..(9): Crosslink between residues
  MOD_RES (9)..(9): Alpha-Me S5-pentenyl-alanine olefin amino acid connected by an all-carbon crosslinker comprising one double bond
  C-term NH2
FAAYWEVLAA

SEQ ID NO: 1118 - protein, 10 aa, Artificial Sequence
  Description of Artificial Sequence: Synthetic peptide
  N-term Ac
  MOD_RES (2)..(2): Alpha-Me R8-octenyl-alanine olefin amino acid connected by an all-carbon crosslinker comprising one double bond
  misc_feature (2)..(9): Crosslink between residues
  MOD_RES (9)..(9): Alpha-Me S5-pentenyl-alanine olefin amino acid connected by an all-carbon crosslinker comprising one double bond
  C-term NH2
FAAYWEFLAA

SEQ ID NO: 1119 - protein, 10 aa, Artificial Sequence
  Description of Artificial Sequence: Synthetic peptide
  N-term Ac
  MOD_RES (2)..(2): Alpha-Me R8-octenyl-alanine olefin amino acid connected by an all-carbon crosslinker comprising one double bond
  misc_feature (2)..(9): Crosslink between residues
  MOD_RES (9)..(9): Alpha-Me S5-pentenyl-alanine olefin amino acid connected by an all-carbon crosslinker comprising one double bond
  C-term NH2
FAAYWEWLAA

SEQ ID NO: 1120 - protein, 10 aa, Artificial Sequence
  Description of Artificial Sequence: Synthetic peptide
  N-term Ac
  MOD_RES (2)..(2): Alpha-Me R8-octenyl-alanine olefin amino acid connected by an all-carbon crosslinker comprising one double bond
  misc_feature (2)..(9): Crosslink between residues
  MOD_RES (9)..(9): Alpha-Me S5-pentenyl-alanine olefin amino acid connected by an all-carbon crosslinker comprising one double bond
  C-term NH2
FAAYWERLAA

SEQ ID NO: 1121 - protein, 10 aa, Artificial Sequence
  Description of Artificial Sequence: Synthetic peptide
  N-term Ac
  MOD_RES (2)..(2): Alpha-Me R8-octenyl-alanine olefin amino acid connected by an all-carbon crosslinker comprising one double bond
  misc_feature (2)..(9): Crosslink between residues
  MOD_RES (9)..(9): Alpha-Me S5-pentenyl-alanine olefin amino acid connected by an all-carbon crosslinker comprising one double bond
  C-term NH2
FAAYWEKLAA

SEQ ID NO: 1122 - protein, 10 aa, Artificial Sequence
  Description of Artificial Sequence: Synthetic peptide
  N-term Ac
  MOD_RES (2)..(2): Alpha-Me R8-octenyl-alanine olefin amino acid connected by an all-carbon crosslinker comprising one double bond
  misc_feature (2)..(9): Crosslink between residues
  MOD_RES (7)..(7): Ac3c
  MOD_RES (9)..(9): Alpha-Me S5-pentenyl-alanine olefin amino acid connected by an all-carbon crosslinker comprising one double bond
  C-term NH2
FAAYWEXLAV

SEQ ID NO: 1123 - protein, 10 aa, Artificial Sequence
  Description of Artificial Sequence: Synthetic peptide
  N-term Ac
  MOD_RES (2)..(2): Alpha-Me R8-octenyl-alanine olefin amino acid connected by an all-carbon crosslinker comprising one double bond
  misc_feature (2)..(9): Crosslink between residues
  MOD_RES (7)..(7): Ac3c
  MOD_RES (9)..(9): Alpha-Me S5-pentenyl-alanine olefin amino acid connected by an all-carbon crosslinker comprising one double bond
  C-term NH2
FAAYWEXLAF

SEQ ID NO: 1124 - protein, 10 aa, Artificial Sequence
  Description of Artificial Sequence: Synthetic peptide
  N-term Ac
  MOD_RES (2)..(2): Alpha-Me R8-octenyl-alanine olefin amino acid connected by an all-carbon crosslinker comprising one double bond
  misc_feature (2)..(9): Crosslink between residues
  MOD_RES (7)..(7): Ac3c
  MOD_RES (9)..(9): Alpha-Me S5-pentenyl-alanine olefin amino acid connected by an all-carbon crosslinker comprising one double bond
  C-term NH2
FAAYWEXLAW

SEQ ID NO: 1125 - protein, 10 aa, Artificial Sequence
  Description of Artificial Sequence: Synthetic peptide
  N-term Ac
  MOD_RES (2)..(2): Alpha-Me R8-octenyl-alanine olefin amino acid connected by an all-carbon crosslinker comprising one double bond
  misc_feature (2)..(9): Crosslink between residues
  MOD_RES (7)..(7): Ac3c
  MOD_RES (9)..(9): Alpha-Me S5-pentenyl-alanine olefin amino acid connected by an all-carbon crosslinker comprising one double bond
  C-term NH2
FAAYWEXLAR

SEQ ID NO: 1126 - protein, 10 aa, Artificial Sequence
  Description of Artificial Sequence: Synthetic peptide
  N-term Ac
  MOD_RES (2)..(2): Alpha-Me R8-octenyl-alanine olefin amino acid connected by an all-carbon crosslinker comprising one double bond
  misc_feature (2)..(9): Crosslink between residues
  MOD_RES (7)..(7): Ac3c
  MOD_RES (9)..(9): Alpha-Me S5-pentenyl-alanine olefin amino acid connected by an all-carbon crosslinker comprising one double bond
  C-term NH2
FAAYWEXLAK

SEQ ID NO: 1127 - protein, 11 aa, Artificial Sequence
  Description of Artificial Sequence: Synthetic peptide
  N-term Ac
  MOD_RES (2)..(2): Alpha-Me R8-octenyl-alanine olefin amino acid connected by an all-carbon crosslinker comprising one double bond
  misc_feature (2)..(9): Crosslink between residues
  MOD_RES (7)..(7): Ac3c
  MOD_RES (9)..(9): Alpha-Me S5-pentenyl-alanine olefin amino acid connected by an all-carbon crosslinker comprising one double bond
  C-term NH2
FAAYWEXLAAV

SEQ ID NO: 1128 - protein, 11 aa, Artificial Sequence
  Description of Artificial Sequence: Synthetic peptide
  N-term Ac
  MOD_RES (2)..(2): Alpha-Me R8-octenyl-alanine olefin amino acid connected by an all-carbon crosslinker comprising one double bond
  misc_feature (2)..(9): Crosslink between residues
  MOD_RES (7)..(7): Ac3c
  MOD_RES (9)..(9): Alpha-Me S5-pentenyl-alanine olefin amino acid connected by an all-carbon crosslinker comprising one double bond
  C-term NH2
FAAYWEXLAAF

SEQ ID NO: 1129 - protein, 11 aa, Artificial Sequence
  Description of Artificial Sequence: Synthetic peptide
  N-term Ac
  MOD_RES (2)..(2): Alpha-Me R8-octenyl-alanine olefin amino acid connected by an all-carbon crosslinker comprising one double bond
  misc_feature (2)..(9): Crosslink between residues
  MOD_RES (7)..(7): Ac3c
  MOD_RES (9)..(9): Alpha-Me S5-pentenyl-alanine olefin amino acid connected by an all-carbon crosslinker comprising one double bond
  C-term NH2
FAAYWEXLAAW

SEQ ID NO: 1130 - protein, 11 aa, Artificial Sequence
  Description of Artificial Sequence: Synthetic peptide
  N-term Ac
  MOD_RES (2)..(2): Alpha-Me R8-octenyl-alanine olefin amino acid connected by an all-carbon crosslinker comprising one double bond
  misc_feature (2)..(9): Crosslink between residues
  MOD_RES (7)..(7): Ac3c
  MOD_RES (9)..(9): Alpha-Me S5-pentenyl-alanine olefin amino acid connected by an all-carbon crosslinker comprising one double bond
  C-term NH2
FAAYWEXLAAR

SEQ ID NO: 1131 - protein, 11 aa, Artificial Sequence
  Description of Artificial Sequence: Synthetic peptide
  N-term Ac
  MOD_RES (2)..(2): Alpha-Me R8-octenyl-alanine olefin amino acid connected by an all-carbon crosslinker comprising one double bond
  misc_feature (2)..(9): Crosslink between residues
  MOD_RES (7)..(7): Ac3c
  MOD_RES (9)..(9): Alpha-Me S5-pentenyl-alanine olefin amino acid connected by an all-carbon crosslinker comprising one double bond
  C-term NH2
FAAYWEXLAAK

SEQ ID NO: 1132 - protein, 11 aa, Artificial Sequence
  Description of Artificial Sequence: Synthetic peptide
  N-term Ac
  MOD_RES (2)..(2): Alpha-Me R8-octenyl-alanine olefin amino acid connected by an all-carbon crosslinker comprising one double bond
  misc_feature (2)..(9): Crosslink between residues
  MOD_RES (7)..(7): Ac3c
  MOD_RES (9)..(9): Alpha-Me S5-pentenyl-alanine olefin amino acid connected by an all-carbon crosslinker comprising one double bond
  C-term NH2
FAAYWEXLAAH

SEQ ID NO: 1133 - protein, 12 aa, Artificial Sequence
  Description of Artificial Sequence: Synthetic peptide
  N-term Ac
  MOD_RES (3)..(3): Phe-2NO2
  MOD_RES (4)..(4): Alpha-Me R8-octenyl-alanine olefin amino acid connected by an all-carbon crosslinker comprising one double bond
  misc_feature (4)..(11): Crosslink between residues
  MOD_RES (11)..(11): Alpha-Me S5-pentenyl-alanine olefin amino acid connected by an all-carbon crosslinker comprising one double bond
  C-term NH2
LTFAHYWAQLAS

SEQ ID NO: 1134 - protein, 12 aa, Artificial Sequence
  Description of Artificial Sequence: Synthetic peptide
  N-term Ac
  MOD_RES (4)..(4): Alpha-Me R8-octenyl-alanine olefin amino acid connected by an all-carbon crosslinker comprising one double bond
  misc_feature (4)..(11): Crosslink between residues
  MOD_RES (11)..(11): Alpha-Me S5-pentenyl-alanine olefin amino acid connected by an all-carbon crosslinker comprising one double bond
  C-term NH2
LTAAHYAAQLAS

SEQ ID NO: 1135 - protein, 12 aa, Artificial Sequence
  Description of Artificial Sequence: Synthetic peptide
  N-term Ac
  MOD_RES (4)..(4): Alpha-Me R8-octenyl-alanine olefin amino acid connected by an all-carbon crosslinker comprising one double bond
  misc_feature (4)..(11): Crosslink between residues
  MOD_RES (11)..(11): Alpha-Me S5-pentenyl-alanine olefin amino acid connected by an all-carbon crosslinker comprising one double bond
  C-term NH2
LTFAHYAAQLAS

SEQ ID NO: 1136 - protein, 16 aa, Artificial Sequence
  Description of Artificial Sequence: Synthetic peptide
  N-term Ac
  MOD_RES (7)..(7): Alpha-Me R8-octenyl-alanine olefin amino acid connected by an all-carbon crosslinker comprising one double bond
  misc_feature (7)..(14): Crosslink between residues
  MOD_RES (14)..(14): Alpha-Me S5-pentenyl-alanine olefin amino acid connected by an all-carbon crosslinker comprising one double bond
  C-term NH2
QSQQTFANLWALLAAN

SEQ ID NO: 1137 - protein, 16 aa, Artificial Sequence
  Description of Artificial Sequence: Synthetic peptide
  N-term Ac
  MOD_RES (2)..(2): 2-aminoisobutyric acid
  MOD_RES (7)..(7): Alpha-Me R8-octenyl-alanine olefin amino acid connected by an all-carbon crosslinker comprising one double bond
  misc_feature (7)..(14): Crosslink between residues
  MOD_RES (14)..(14): Alpha-Me S5-pentenyl-alanine olefin amino acid connected by an all-carbon crosslinker comprising one double bond
  C-term NH2
QXQQTFANLWALLAAN

SEQ ID NO: 1138 - protein, 16 aa, Artificial Sequence
  Description of Artificial Sequence: Synthetic peptide
  N-term Ac
  MOD_RES (2)..(2): 2-aminoisobutyric acid
  MOD_RES (7)..(7): Alpha-Me R8-octenyl-alanine olefin amino acid connected by an all-carbon crosslinker comprising one double bond
  misc_feature (7)..(14): Crosslink between residues
  MOD_RES (14)..(14): Alpha-Me S5-pentenyl-alanine olefin amino acid connected by an all-carbon crosslinker comprising one double bond
  C-term NH2
QXQQTFAALWALLAAN

SEQ ID NO: 1139 - protein, 16 aa, Artificial Sequence
  Description of Artificial Sequence: Synthetic peptide
  N-term Ac
  MOD_RES (7)..(7): Alpha-Me R8-octenyl-alanine olefin amino acid connected by an all-carbon crosslinker comprising one double bond
  misc_feature (7)..(14): Crosslink between residues
  MOD_RES (14)..(14): Alpha-Me S5-pentenyl-alanine olefin amino acid connected by an all-carbon crosslinker comprising one double bond
  C-term NH2
AAAATFAAAWAALAAA

SEQ ID NO: 1140 - protein, 10 aa, Artificial Sequence
  Description of Artificial Sequence: Synthetic peptide
  N-term Ac
  MOD_RES (2)..(2): Alpha-Me R8-octenyl-alanine olefin amino acid connected by an all-carbon crosslinker comprising one double bond
  misc_feature (2)..(9): Crosslink between residues
  MOD_RES (9)..(9): Alpha-Me S5-pentenyl-alanine olefin amino acid connected by an all-carbon crosslinker comprising one double bond
  C-term NH2
FAAAWRALAQ

SEQ ID NO: 1141 - protein, 11 aa, Artificial Sequence
  Description of Artificial Sequence: Synthetic peptide
  N-term Ac
  MOD_RES (3)..(3): Alpha-Me R8-octenyl-alanine olefin amino acid connected by an all-carbon crosslinker comprising one double bond
  misc_feature (3)..(10): Crosslink between residues
  MOD_RES (10)..(10): Alpha-Me S5-pentenyl-alanine olefin amino acid connected by an all-carbon crosslinker comprising one double bond
  C-term NH2
TFAAAWAALAQ

SEQ ID NO: 1142 - protein, 11 aa, Artificial Sequence
  Description of Artificial Sequence: Synthetic peptide
  N-term Ac
  MOD_RES (3)..(3): Alpha-Me R8-octenyl-alanine olefin amino acid connected by an all-carbon crosslinker comprising one double bond
  misc_feature (3)..(10): Crosslink between residues
  MOD_RES (10)..(10): Alpha-Me S5-pentenyl-alanine olefin amino acid connected by an all-carbon crosslinker comprising one double bond
  C-term NH2
TFAAAWRALAA

SEQ ID NO: 1143 - protein, 11 aa, Artificial Sequence
  Description of Artificial Sequence: Synthetic peptide
  N-term Ac
  MOD_RES (3)..(3): Alpha-Me R8-octenyl-alanine olefin amino acid connected by an all-carbon crosslinker comprising one double bond
  misc_feature (3)..(10): Crosslink between residues
  MOD_RES (10)..(10): Alpha-Me S5-pentenyl-alanine olefin amino acid connected by an all-carbon crosslinker comprising one double bond
  C-term NH2
VFAAAWRALAQ

SEQ ID NO: 1144 - protein, 11 aa, Artificial Sequence
  Description of Artificial Sequence: Synthetic peptide
  N-term Ac
  MOD_RES (3)..(3): Alpha-Me R8-octenyl-alanine olefin amino acid connected by an all-carbon crosslinker comprising one double bond
  misc_feature (3)..(10): Crosslink between residues
  MOD_RES (10)..(10): Alpha-Me S5-pentenyl-alanine olefin amino acid connected by an all-carbon crosslinker comprising one double bond
  C-term NH2
AFAAAWAALAA

SEQ ID NO: 1145 - protein, 11 aa, Artificial Sequence
  Description of Artificial Sequence: Synthetic peptide
  N-term Ac
  MOD_RES (3)..(3): Alpha-Me R8-octenyl-alanine olefin amino acid connected by an all-carbon crosslinker comprising one double bond
  misc_feature (3)..(10): Crosslink between residues
  MOD_RES (10)..(10): Alpha-Me S5-pentenyl-alanine olefin amino acid connected by an all-carbon crosslinker comprising one double bond
  C-term NH2
TFAAAWKALAQ

SEQ ID NO: 1146 - protein, 11 aa, Artificial Sequence
  Description of Artificial Sequence: Synthetic peptide
  N-term Ac
  MOD_RES (3)..(3): Alpha-Me R8-octenyl-alanine olefin amino acid connected by an all-carbon crosslinker comprising one double bond
  misc_feature (3)..(10): Crosslink between residues
  MOD_RES (7)..(7): Ornithine
  MOD_RES (10)..(10): Alpha-Me S5-pentenyl-alanine olefin amino acid connected by an all-carbon crosslinker comprising one double bond
  C-term NH2
TFAAAWXALAQ

SEQ ID NO: 1147 - protein, 11 aa, Artificial Sequence
  Description of Artificial Sequence: Synthetic peptide
  N-term Ac
  MOD_RES (3)..(3): Alpha-Me R8-octenyl-alanine olefin amino acid connected by an all-carbon crosslinker comprising one double bond
  misc_feature (3)..(10): Crosslink between residues
  MOD_RES (10)..(10): Alpha-Me S5-pentenyl-alanine olefin amino acid connected by an all-carbon crosslinker comprising one double bond
  C-term NH2
TFAAAWSALAQ

SEQ ID NO: 1148 - protein, 12 aa, Artificial Sequence
  Description of Artificial Sequence: Synthetic peptide
  N-term Ac
  MOD_RES (4)..(4): Alpha-Me R8-octenyl-alanine olefin amino acid connected by an all-carbon crosslinker comprising one double bond
  misc_feature (4)..(11): Crosslink between residues
  MOD_RES (11)..(11): Alpha-Me S5-pentenyl-alanine olefin amino acid connected by an all-carbon crosslinker comprising one double bond
  C-term NH2
LTFAAAWRALAQ

SEQ ID NO: 1149 - protein, 10 aa, Artificial Sequence
  Description of Artificial Sequence: Synthetic peptide
  N-term Ac
  MOD_RES (2)..(2): Alpha-Me R8-octenyl-alanine olefin amino acid connected by an all-carbon crosslinker comprising one double bond
  misc_feature (2)..(9): Crosslink between residues
  MOD_RES (9)..(9): Alpha-Me S5-pentenyl-alanine olefin amino acid connected by an all-carbon crosslinker comprising one double bond
  C-term NH2
FAAYWAQLAA

SEQ ID NO: 1150 - protein, 10 aa, Artificial Sequence
  Description of Artificial Sequence: Synthetic peptide
  N-term Ac
  MOD_RES (2)..(2): Alpha-Me R8-octenyl-alanine olefin amino acid connected by an all-carbon crosslinker comprising one double bond
  misc_feature (2)..(9): Crosslink between residues
  MOD_RES (9)..(9): Alpha-Me S5-pentenyl-alanine olefin amino acid connected by an all-carbon crosslinker comprising one double bond
  C-term NH2
FAAWWAALAA

SEQ ID NO: 1151 - protein, 10 aa, Artificial Sequence
  Description of Artificial Sequence: Synthetic peptide
  N-term Ac
  MOD_RES (2)..(2): Alpha-Me R8-octenyl-alanine olefin amino acid connected by an all-carbon crosslinker comprising one double bond
  misc_feature (2)..(9): Crosslink between residues
  MOD_RES (9)..(9): Alpha-Me S5-pentenyl-alanine olefin amino acid connected by an all-carbon crosslinker comprising one double bond
  C-term NH2
FAAWWAQLAA

SEQ ID NO: 1152 - protein, 9 aa, Artificial Sequence
  Description of Artificial Sequence: Synthetic peptide
  N-term Ac
  MOD_RES (2)..(2): Alpha-Me R8-octenyl-alanine olefin amino acid connected by an all-carbon crosslinker comprising one double bond
  misc_feature (2)..(9): Crosslink between residues
  MOD_RES (9)..(9): Alpha-Me S5-pentenyl-alanine olefin amino acid connected by an all-carbon crosslinker comprising one double bond
  C-term NH2
FAAYWEALA

SEQ ID NO: 1153 - protein, 9 aa, Artificial Sequence
  Description of Artificial Sequence: Synthetic peptide
  N-term Ac
  MOD_RES (2)..(2): Alpha-Me R8-octenyl-alanine olefin amino acid connected by an all-carbon crosslinker comprising one double bond
  misc_feature (2)..(9): Crosslink between residues
  MOD_RES (9)..(9): Alpha-Me S5-pentenyl-alanine olefin amino acid connected by an all-carbon crosslinker comprising one double bond
  C-term NH2
FAAYWAALA

SEQ ID NO: 1154 - protein, 9 aa, Artificial Sequence
  Description of Artificial Sequence: Synthetic peptide
  N-term Ac
  MOD_RES (2)..(2): Alpha-Me R8-octenyl-alanine olefin amino acid connected by an all-carbon crosslinker comprising one double bond
  misc_feature (2)..(9): Crosslink between residues
  MOD_RES (9)..(9): Alpha-Me S5-pentenyl-alanine olefin amino acid connected by an all-carbon crosslinker comprising one double bond
  C-term NH2
FAAYWKALA

SEQ ID NO: 1155 - protein, 9 aa, Artificial Sequence
  Description of Artificial Sequence: Synthetic peptide
  N-term Ac
  MOD_RES (2)..(2): Alpha-Me R8-octenyl-alanine olefin amino acid connected by an all-carbon crosslinker comprising one double bond
  misc_feature (2)..(9): Crosslink between residues
  MOD_RES (6)..(6): Ornithine
  MOD_RES (9)..(9): Alpha-Me S5-pentenyl-alanine olefin amino acid connected by an all-carbon crosslinker comprising one double bond
  C-term NH2
FAAYWXALA

SEQ ID NO: 1156 - protein, 9 aa, Artificial Sequence
  Description of Artificial Sequence: Synthetic peptide
  N-term Ac
  MOD_RES (2)..(2): Alpha-Me R8-octenyl-alanine olefin amino acid connected by an all-carbon crosslinker comprising one double bond
  misc_feature (2)..(9): Crosslink between residues
  MOD_RES (9)..(9): Alpha-Me S5-pentenyl-alanine olefin amino acid connected by an all-carbon crosslinker comprising one double bond
  C-term NH2
FAAYWQALA

SEQ ID NO: 1157 - protein, 9 aa, Artificial Sequence
  Description of Artificial Sequence: Synthetic peptide
  N-term Ac
  MOD_RES (2)..(2): Alpha-Me R8-octenyl-alanine olefin amino acid connected by an all-carbon crosslinker comprising one double bond
  misc_feature (2)..(9): Crosslink between residues
  MOD_RES (9)..(9): Alpha-Me S5-pentenyl-alanine olefin amino acid connected by an all-carbon crosslinker comprising one double bond
  C-term NH2
FAAYWAQLA

SEQ ID NO: 1158 - protein, 10 aa, Artificial Sequence
  Description of Artificial Sequence: Synthetic peptide
  N-term Ac
  MOD_RES (2)..(2): Alpha-Me R8-octenyl-alanine olefin amino acid connected by an all-carbon crosslinker comprising one double bond
  misc_feature (2)..(9): Crosslink between residues
  MOD_RES (9)..(9): Alpha-Me S5-pentenyl-alanine olefin amino acid connected by an all-carbon crosslinker comprising one double bond
  C-term NH2
FAHYWDQLAS

SEQ ID NO: 1159 - protein, 10 aa, Artificial Sequence
  Description of Artificial Sequence: Synthetic peptide
  N-term Ac
  MOD_RES (2)..(2): Alpha-Me R8-octenyl-alanine olefin amino acid connected by an all-carbon crosslinker comprising one double bond
  misc_feature (2)..(9): Crosslink between residues
  MOD_RES (9)..(9): Alpha-Me S5-pentenyl-alanine olefin amino acid connected by an all-carbon crosslinker comprising one double bond
  C-term NH2
FAHFWEQLAS

SEQ ID NO: 1160 - protein, 10 aa, Artificial Sequence
  Description of Artificial Sequence: Synthetic peptide
  N-term Ac
  MOD_RES (2)..(2): Alpha-Me R8-octenyl-alanine olefin amino acid connected by an all-carbon crosslinker comprising one double bond
  misc_feature (2)..(9): Crosslink between residues
  MOD_RES (9)..(9): Alpha-Me S5-pentenyl-alanine olefin amino acid connected by an all-carbon crosslinker comprising one double bond
  C-term NH2
FAAYWHQLAS

SEQ ID NO: 1161 - protein, 10 aa, Artificial Sequence
  Description of Artificial Sequence: Synthetic peptide
  N-term Ac
  MOD_RES (2)..(2): Alpha-Me R8-octenyl-alanine olefin amino acid connected by an all-carbon crosslinker comprising one double bond
  misc_feature (2)..(9): Crosslink between residues
  MOD_RES (9)..(9): Alpha-Me S5-pentenyl-alanine olefin amino acid connected by an all-carbon crosslinker comprising one double bond
  C-term NH2
FAAYWKQLAS

SEQ ID NO: 1162 - protein, 10 aa, Artificial Sequence
  Description of Artificial Sequence: Synthetic peptide
  N-term Ac
  MOD_RES (2)..(2): Alpha-Me R8-octenyl-alanine olefin amino acid connected by an all-carbon crosslinker comprising one double bond
  misc_feature (2)..(9): Crosslink between residues
  MOD_RES (6)..(6): Ornithine
  MOD_RES (9)..(9): Alpha-Me S5-pentenyl-alanine olefin amino acid connected by an all-carbon crosslinker comprising one double bond
  C-term NH2
FAAYWXQLAS

SEQ ID NO: 1163 - protein, 10 aa, Artificial Sequence
  Description of Artificial Sequence: Synthetic peptide
  N-term Ac
  MOD_RES (2)..(2): Alpha-Me R8-octenyl-alanine olefin amino acid connected by an all-carbon crosslinker comprising one double bond
  misc_feature (2)..(9): Crosslink between residues
  MOD_RES (9)..(9): Alpha-Me S5-pentenyl-alanine olefin amino acid connected by an all-carbon crosslinker comprising one double bond
  C-term NH2
FAHYWSQLAS

SEQ ID NO: 1164 - protein, 10 aa, Artificial Sequence
  Description of Artificial Sequence: Synthetic peptide
  N-term Ac
  MOD_RES (2)..(2): Alpha-Me R8-octenyl-alanine olefin amino acid connected by an all-carbon crosslinker comprising one double bond
  misc_feature (2)..(9): Crosslink between residues
  MOD_RES (9)..(9): Alpha-Me S5-pentenyl-alanine olefin amino acid connected by an all-carbon crosslinker comprising one double bond
  C-term NH2
FAHWWEQLAS

SEQ ID NO: 1165 - protein, 10 aa, Artificial Sequence
  Description of Artificial Sequence: Synthetic peptide
  N-term Ac
  MOD_RES (2)..(2): Alpha-Me R8-octenyl-alanine olefin amino acid connected by an all-carbon crosslinker comprising one double bond
  misc_feature (2)..(9): Crosslink between residues
  MOD_RES (9)..(9): Alpha-Me S5-pentenyl-alanine olefin amino acid connected by an all-carbon crosslinker comprising one double bond
  C-term NH2
FAHWWAQLAS

SEQ ID NO: 1166 - protein, 10 aa, Artificial Sequence
  Description of Artificial Sequence: Synthetic peptide
  N-term Ac
  MOD_RES (2)..(2): Alpha-Me R8-octenyl-alanine olefin amino acid connected by an all-carbon crosslinker comprising one double bond
  misc_feature (2)..(9): Crosslink between residues
  MOD_RES (9)..(9): Alpha-Me S5-pentenyl-alanine olefin amino acid connected by an all-carbon crosslinker comprising one double bond
  C-term NH2
FAAWWHQLAS

SEQ ID NO: 1167 - protein, 10 aa, Artificial Sequence
  Description of Artificial Sequence: Synthetic peptide
  N-term Ac
  MOD_RES (2)..(2): Alpha-Me R8-octenyl-alanine olefin amino acid connected by an all-carbon crosslinker comprising one double bond
  misc_feature (2)..(9): Crosslink between residues
  MOD_RES (9)..(9): Alpha-Me S5-pentenyl-alanine olefin amino acid connected by an all-carbon crosslinker comprising one double bond
  C-term NH2
FAAWWKQLAS

SEQ ID NO: 1168 - protein, 10 aa, Artificial Sequence
  Description of Artificial Sequence: Synthetic peptide
  N-term Ac
  MOD_RES (2)..(2): Alpha-Me R8-octenyl-alanine olefin amino acid connected by an all-carbon crosslinker comprising one double bond
  misc_feature (2)..(9): Crosslink between residues
  MOD_RES (6)..(6): Ornithine
  MOD_RES (9)..(9): Alpha-Me S5-pentenyl-alanine olefin amino acid connected by an all-carbon crosslinker comprising one double bond
  C-term NH2
FAAWWXQLAS

SEQ ID NO: 1169 - protein, 10 aa, Artificial Sequence
  Description of Artificial Sequence: Synthetic peptide
  N-term Ac
  MOD_RES (2)..(2): Alpha-Me R8-octenyl-alanine olefin amino acid connected by an all-carbon crosslinker comprising one double bond
  misc_feature (2)..(9): Crosslink between residues
  MOD_RES (9)..(9): Alpha-Me S5-pentenyl-alanine olefin amino acid connected by an all-carbon crosslinker comprising one double bond
  C-term NH2
FAHWWSQLAS

SEQ ID NO: 1170 - protein, 12 aa, Artificial Sequence
  Description of Artificial Sequence: Synthetic peptide
  N-term Ac
  MOD_RES (4)..(4): Alpha-Me R8-octenyl-alanine olefin amino acid connected by an all-carbon crosslinker comprising one double bond
  misc_feature (4)..(11): Crosslink between residues
  MOD_RES (9)..(9): Norleucine
  MOD_RES (11)..(11): Alpha-Me S5-pentenyl-alanine olefin amino acid connected by an all-carbon crosslinker comprising one double bond
  C-term NH2
LTFANYWALLAQ

SEQ ID NO: 1171 - protein, 12 aa, Artificial Sequence
  Description of Artificial Sequence: Synthetic peptide
  N-term Ac
  MOD_RES (4)..(4): Alpha-Me R8-octenyl-alanine olefin amino acid connected by an all-carbon crosslinker comprising one double bond
  misc_feature (4)..(11): Crosslink between residues
  MOD_RES (11)..(11): Alpha-Me S5-pentenyl-alanine olefin amino acid connected by an all-carbon crosslinker comprising one double bond
  C-term NH2
LTFANLWAQLAQ

SEQ ID NO: 1172 - protein, 12 aa, Artificial Sequence
  Description of Artificial Sequence: Synthetic peptide
  N-term Ac
  MOD_RES (4)..(4): Alpha-Me R8-octenyl-alanine olefin amino acid connected by an all-carbon crosslinker comprising one double bond
  misc_feature (4)..(11): Crosslink between residues
  MOD_RES (9)..(9): Norleucine
  MOD_RES (11)..(11): Alpha-Me S5-pentenyl-alanine olefin amino acid connected by an all-carbon crosslinker comprising one double bond
  C-term NH2
LTFANYWALLAA

SEQ ID NO: 1173 - protein, 12 aa, Artificial Sequence
  Description of Artificial Sequence: Synthetic peptide
  N-term Ac
  MOD_RES (4)..(4): Alpha-Me R8-octenyl-alanine olefin amino acid connected by an all-carbon crosslinker comprising one double bond
  misc_feature (4)..(11): Crosslink between residues
  MOD_RES (11)..(11): Alpha-Me S5-pentenyl-alanine olefin amino acid connected by an all-carbon crosslinker comprising one double bond
  C-term NH2
LTFANLWAQLAA

SEQ ID NO: 1174 - protein, 12 aa, Artificial Sequence
  Description of Artificial Sequence: Synthetic peptide
  N-term Ac
  MOD_RES (4)..(4): Alpha-Me R8-octenyl-alanine olefin amino acid connected by an all-carbon crosslinker comprising one double bond
  misc_feature (4)..(11): Crosslink between residues
  MOD_RES (9)..(9): Norleucine
  MOD_RES (11)..(11): Alpha-Me S5-pentenyl-alanine olefin amino acid connected by an all-carbon crosslinker comprising one double bond
  C-term NH2
LTFAAYWALLAQ

SEQ ID NO: 1175 - protein, 12 aa, Artificial Sequence
  Description of Artificial Sequence: Synthetic peptide
  N-term Ac
  MOD_RES (4)..(4): Alpha-Me R8-octenyl-alanine olefin amino acid connected by an all-carbon crosslinker comprising one double bond
  misc_feature (4)..(11): Crosslink between residues
  MOD_RES (11)..(11): Alpha-Me S5-pentenyl-alanine olefin amino acid connected by an all-carbon crosslinker comprising one double bond
  C-term NH2
LTFAALWAQLAQ

SEQ ID NO: 1176 - protein, 12 aa, Artificial Sequence
  Description of Artificial Sequence: Synthetic peptide
  N-term Ac
  MOD_RES (4)..(4): Alpha-Me R8-octenyl-alanine olefin amino acid connected by an all-carbon crosslinker comprising one double bond
  misc_feature (4)..(11): Crosslink between residues
  MOD_RES (9)..(9): Norleucine
  MOD_RES (11)..(11): Alpha-Me S5-pentenyl-alanine olefin amino acid connected by an all-carbon crosslinker comprising one double bond
  C-term NH2
LAFANYWALLAQ

SEQ ID NO: 1177 - protein, 12 aa, Artificial Sequence
  Description of Artificial Sequence: Synthetic peptide
  N-term Ac
  MOD_RES (4)..(4): Alpha-Me R8-octenyl-alanine olefin amino acid connected by an all-carbon crosslinker comprising one double bond
  misc_feature (4)..(11): Crosslink between residues
  MOD_RES (11)..(11): Alpha-Me S5-pentenyl-alanine olefin amino acid connected by an all-carbon crosslinker comprising one double bond
  C-term NH2
LAFANLWAQLAQ

SEQ ID NO: 1178 - protein, 12 aa, Artificial Sequence
  Description of Artificial Sequence: Synthetic peptide
  N-term Ac
  MOD_RES (4)..(4): Alpha-Me R8-octenyl-alanine olefin amino acid connected by an all-carbon crosslinker comprising one double bond
  misc_feature (4)..(11): Crosslink between residues
  MOD_RES (9)..(9): Norleucine
  MOD_RES (11)..(11): Alpha-Me S5-pentenyl-alanine olefin amino acid connected by an all-carbon crosslinker comprising one double bond
  C-term NH2
LAFAAYWALLAA

SEQ ID NO: 1179 - protein, 12 aa, Artificial Sequence
  Description of Artificial Sequence: Synthetic peptide
  N-term Ac
  MOD_RES (4)..(4): Alpha-Me R8-octenyl-alanine olefin amino acid connected by an all-carbon crosslinker comprising one double bond
  misc_feature (4)..(11): Crosslink between residues
  MOD_RES (11)..(11): Alpha-Me S5-pentenyl-alanine olefin amino acid connected by an all-carbon crosslinker comprising one double bond
  C-term NH2
LAFAALWAQLAA

SEQ ID NO: 1180 - protein, 12 aa, Artificial Sequence
  Description of Artificial Sequence: Synthetic peptide
  N-term Ac
  MOD_RES (4)..(4): Alpha-Me R8-octenyl-alanine olefin amino acid connected by an all-carbon crosslinker comprising one double bond
  misc_feature (4)..(11): Crosslink between residues
  MOD_RES (11)..(11): Alpha-Me S5-pentenyl-alanine olefin amino acid connected by an all-carbon crosslinker comprising one double bond
  C-term NH2
LAFAAYWAALAA

SEQ ID NO: 1181 - protein, 11 aa, Artificial Sequence
  Description of Artificial Sequence: Synthetic peptide
  N-term Ac
  MOD_RES (2)..(2): Alpha-Me R8-octenyl-alanine olefin amino acid connected by an all-carbon crosslinker comprising one double bond
  misc_feature (2)..(9): Crosslink between residues
  MOD_RES (7)..(7): Ac3c
  MOD_RES (9)..(9): Alpha-Me S5-pentenyl-alanine olefin amino acid connected by an all-carbon crosslinker comprising one double bond
  MOD_RES (11)..(11): 2-aminoisobutyric acid
  C-term NH2
FAAYWEXLAAX

SEQ ID NO: 1182 - protein, 11 aa, Artificial Sequence
  Description of Artificial Sequence: Synthetic peptide
  N-term Ac
  MOD_RES (2)..(2): Alpha-Me R8-octenyl-alanine olefin amino acid connected by an all-carbon crosslinker comprising one double bond
  misc_feature (2)..(9): Crosslink between residues
  MOD_RES (9)..(9): Alpha-Me S5-pentenyl-alanine olefin amino acid connected by an all-carbon crosslinker comprising one double bond
  C-term NH2
FAAYWAQLAAA

SEQ ID NO: 1183 - protein, 11 aa, Artificial Sequence
  Description of Artificial Sequence: Synthetic peptide
  N-term Ac
  MOD_RES (2)..(2): Alpha-Me R8-octenyl-alanine olefin amino acid connected by an all-carbon crosslinker comprising one double bond
  misc_feature (2)..(9): Crosslink between residues
  MOD_RES (7)..(7): Ac3c
  MOD_RES (9)..(9): Alpha-Me S5-pentenyl-alanine olefin amino acid connected by an all-carbon crosslinker comprising one double bond
  C-term NH2
FAAYWAXLAAA

SEQ ID NO: 1184 - protein, 11 aa, Artificial Sequence
  Description of Artificial Sequence: Synthetic peptide
  N-term Ac
  MOD_RES (2)..(2): Alpha-Me R8-octenyl-alanine olefin amino acid connected by an all-carbon crosslinker comprising one double bond
  misc_feature (2)..(9): Crosslink between residues
  MOD_RES (7)..(7): Ac3c
  MOD_RES (9)..(9): Alpha-Me S5-pentenyl-alanine olefin amino acid connected by an all-carbon crosslinker comprising one double bond
  C-term NH2
FAAYWSXLAAA

SEQ ID NO: 1185 - protein, 11 aa, Artificial Sequence
  Description of Artificial Sequence: Synthetic peptide
  N-term Ac
  MOD_RES (2)..(2): Alpha-Me R8-octenyl-alanine olefin amino acid connected by an all-carbon crosslinker comprising one double bond
  misc_feature (2)..(9): Crosslink between residues
  MOD_RES (7)..(7): Ac3c
  MOD_RES (9)..(9): Alpha-Me S5-pentenyl-alanine olefin amino acid connected by an all-carbon crosslinker comprising one double bond
  C-term NH2
FAAYWEXLAAS

SEQ ID NO: 1186 - protein, 11 aa, Artificial Sequence
  Description of Artificial Sequence: Synthetic peptide
  N-term Ac
  MOD_RES (2)..(2): Alpha-Me R8-octenyl-alanine olefin amino acid connected by an all-carbon crosslinker comprising one double bond
  misc_feature (2)..(9): Crosslink between residues
  MOD_RES (7)..(7): Ac3c
  MOD_RES (9)..(9): Alpha-Me S5-pentenyl-alanine olefin amino acid connected by an all-carbon crosslinker comprising one double bond
  C-term NH2
FAAYWEXLAAT

SEQ ID NO: 1187 - protein, 11 aa, Artificial Sequence
  Description of Artificial Sequence: Synthetic peptide
  N-term Ac
  MOD_RES (2)..(2): Alpha-Me R8-octenyl-alanine olefin amino acid connected by an all-carbon crosslinker comprising one double bond
  misc_feature (2)..(9): Crosslink between residues
  MOD_RES (7)..(7): Ac3c
  MOD_RES (9)..(9): Alpha-Me S5-pentenyl-alanine olefin amino acid connected by an all-carbon crosslinker comprising one double bond
  C-term NH2
FAAYWEXLAAL

SEQ ID NO: 1188 - protein, 11 aa, Artificial Sequence
  Description of Artificial Sequence: Synthetic peptide
  N-term Ac
  MOD_RES (2)..(2): Alpha-Me R8-octenyl-alanine olefin amino acid connected by an all-carbon crosslinker comprising one double bond
  misc_feature (2)..(9): Crosslink between residues
  MOD_RES (7)..(7): Ac3c
  MOD_RES (9)..(9): Alpha-Me S5-pentenyl-alanine olefin amino acid connected by an all-carbon crosslinker comprising one double bond
  C-term NH2
FAAYWEXLAAQ

SEQ ID NO: 1189 - protein, 11 aa, Artificial Sequence
  Description of Artificial Sequence: Synthetic peptide
  N-term Ac
  MOD_RES (2)..(2): Alpha-Me R8-octenyl-alanine olefin amino acid connected by an all-carbon crosslinker comprising one double bond
  misc_feature (2)..(9): Crosslink between residues
  MOD_RES (7)..(7): Ac3c
  MOD_RES (9)..(9): Alpha-Me S5-pentenyl-alanine olefin amino acid connected by an all-carbon crosslinker comprising one double bond
  C-term NH2
FAAFWEXLAAA

SEQ ID NO: 1190 - protein, 11 aa, Artificial Sequence
  Description of Artificial Sequence: Synthetic peptide
  N-term Ac
  MOD_RES (2)..(2): Alpha-Me R8-octenyl-alanine olefin amino acid connected by an all-carbon crosslinker comprising one double bond
  misc_feature (2)..(9): Crosslink between residues
  MOD_RES (7)..(7): Ac3c
  MOD_RES (9)..(9): Alpha-Me S5-pentenyl-alanine olefin amino acid connected by an all-carbon crosslinker comprising one double bond
  C-term NH2
FAAWWEXLAAA

SEQ ID NO: 1191 - protein, 11 aa, Artificial Sequence
  Description of Artificial Sequence: Synthetic peptide
  N-term Ac
  MOD_RES (2)..(2): Alpha-Me R8-octenyl-alanine olefin amino acid connected by an all-carbon crosslinker comprising one double bond
  misc_feature (2)..(9): Crosslink between residues
  MOD_RES (7)..(7): Ac3c
  MOD_RES (9)..(9): Alpha-Me S5-pentenyl-alanine olefin amino acid connected by an all-carbon crosslinker comprising one double bond
  C-term NH2
FAAYWEXLASA

SEQ ID NO: 1192 - protein, 11 aa, Artificial Sequence
  Description of Artificial Sequence: Synthetic peptide
  N-term Ac
  MOD_RES (2)..(2): Alpha-Me R8-octenyl-alanine olefin amino acid connected by an all-carbon crosslinker comprising one double bond
  misc_feature (2)..(9): Crosslink between residues
  MOD_RES (9)..(9): Alpha-Me S5-pentenyl-alanine olefin amino acid connected by an all-carbon crosslinker comprising one double bond
  C-term NH2
FAAYWEALAAA

SEQ ID NO: 1193 - protein, 11 aa, Artificial Sequence
  Description of Artificial Sequence: Synthetic peptide
  N-term Ac
  MOD_RES (2)..(2): Alpha-Me R8-octenyl-alanine olefin amino acid connected by an all-carbon crosslinker comprising one double bond
  misc_feature (2)..(9): Crosslink between residues
  MOD_RES (7)..(7): Norleucine
  MOD_RES (9)..(9): Alpha-Me S5-pentenyl-alanine olefin amino acid connected by an all-carbon crosslinker comprising one double bond
  C-term NH2
FAAYWELLAAA

SEQ ID NO: 1194 - protein, 11 aa, Artificial Sequence
  Description of Artificial Sequence: Synthetic peptide
  N-term Ac
  MOD_RES (2)..(2): Alpha-Me R8-octenyl-alanine olefin amino acid connected by an all-carbon crosslinker comprising one double bond
  misc_feature (2)..(9): Crosslink between residues
  MOD_RES (7)..(7): Ac3c
  MOD_RES (9)..(9): Alpha-Me S5-pentenyl-alanine olefin amino acid connected by an all-carbon crosslinker comprising one double bond
  MOD_RES (10)..(10): Abu
  C-term NH2
FAAYWEXLAXA

SEQ ID NO: 1195 - protein, 11 aa, Artificial Sequence
  Description of Artificial Sequence: Synthetic peptide
  N-term Ac
  MOD_RES (2)..(2): Alpha-Me R8-octenyl-alanine olefin amino acid connected by an all-carbon crosslinker comprising one double bond
  misc_feature (2)..(9): Crosslink between residues
  MOD_RES (7)..(7): Ac3c
  MOD_RES (9)..(9): Alpha-Me S5-pentenyl-alanine olefin amino acid connected by an all-carbon crosslinker comprising one double bond
  MOD_RES (10)..(10): Norleucine
  C-term NH2
FAAYWEXLALA

SEQ ID NO: 1196 - protein, 11 aa, Artificial Sequence
  Description of Artificial Sequence: Synthetic peptide
  N-term Ac
  MOD_RES (2)..(2): Alpha-Me R8-octenyl-alanine olefin amino acid connected by an all-carbon crosslinker comprising one double bond
  misc_feature (2)..(9): Crosslink between residues
  MOD_RES (7)..(7): 2-aminoisobutyric acid
  MOD_RES (9)..(9): Alpha-Me S5-pentenyl-alanine olefin amino acid connected by an all-carbon crosslinker comprising one double bond
  MOD_RES (10)..(10): Norleucine
  C-term NH2
FAAYWEXLALA

SEQ ID NO: 1197 - protein, 11 aa, Artificial Sequence
  Description of Artificial Sequence: Synthetic peptide
  N-term Ac
  MOD_RES (2)..(2): Alpha-Me R8-octenyl-alanine olefin amino acid connected by an all-carbon crosslinker comprising one double bond
  misc_feature (2)..(9): Crosslink between residues
  MOD_RES (9)..(9): Alpha-Me S5-pentenyl-alanine olefin amino acid connected by an all-carbon crosslinker comprising one double bond
  MOD_RES (10)..(10): Norleucine
  C-term NH2
FAAYWEALALA

SEQ ID NO: 1198 - protein, 11 aa, Artificial Sequence
  Description of Artificial Sequence: Synthetic peptide
  N-term Ac
  MOD_RES (2)..(2): Alpha-Me R8-octenyl-alanine olefin amino acid connected by an all-carbon crosslinker comprising one double bond
  misc_feature (2)..(9): Crosslink between residues
  MOD_RES (7)..(7): Norleucine
  MOD_RES (9)..(9): Alpha-Me S5-pentenyl-alanine olefin amino acid connected by an all-carbon crosslinker comprising one double bond
  MOD_RES (10)..(10): Norleucine
  C-term NH2
FAAYWELLALA

SEQ ID NO: 1199 - protein, 10 aa, Artificial Sequence
  Description of Artificial Sequence: Synthetic peptide
  N-term Ac
  MOD_RES (2)..(2): Alpha-Me R8-octenyl-alanine olefin amino acid connected by an all-carbon crosslinker comprising one double bond
  misc_feature (2)..(9): Crosslink between residues
  MOD_RES (7)..(7): 2-aminoisobutyric acid
  MOD_RES (9)..(9): Alpha-Me S5-pentenyl-alanine olefin amino acid connected by an all-carbon crosslinker comprising one double bond
  MOD_RES (10)..(10): Abu
  C-term NH2
FAAYWEXLAX

SEQ ID NO: 1200 - protein, 10 aa, Artificial Sequence
  Description of Artificial Sequence: Synthetic peptide
  N-term Ac
  MOD_RES (2)..(2): Alpha-Me R8-octenyl-alanine olefin amino acid connected by an all-carbon crosslinker comprising one double bond
  misc_feature (2)..(9): Crosslink between residues
  MOD_RES (7)..(7): Norleucine
  MOD_RES (9)..(9): Alpha-Me S5-pentenyl-alanine olefin amino acid connected by an all-carbon crosslinker comprising one double bond
  MOD_RES (10)..(10): Abu
  C-term NH2
FAAYWELLAX

SEQ ID NO: 1201 - protein, 10 aa, Artificial Sequence
  Description of Artificial Sequence: Synthetic peptide
  N-term Ac
  MOD_RES (2)..(2): Alpha-Me R8-octenyl-alanine olefin amino acid connected by an all-carbon crosslinker comprising one double bond
  misc_feature (2)..(9): Crosslink between residues
  MOD_RES (9)..(9): Alpha-Me S5-pentenyl-alanine olefin amino acid connected by an all-carbon crosslinker comprising one double bond
  MOD_RES (10)..(10): Abu
  C-term NH2
FAAYWEALAX

SEQ ID NO: 1202 - protein, 12 aa, Artificial Sequence
  Description of Artificial Sequence: Synthetic peptide
  N-term Ac
  MOD_RES (4)..(4): Alpha-Me R8-octenyl-alanine olefin amino acid connected by an all-carbon crosslinker comprising one double bond
  misc_feature (4)..(11): Crosslink between residues
  MOD_RES (11)..(11): Alpha-Me S5-pentenyl-alanine olefin amino acid connected by an all-carbon crosslinker comprising one double bond
  C-term NH2
LTFAAFWAQLAS

SEQ ID NO: 1203 - protein, 12 aa, Artificial Sequence
  Description of Artificial Sequence: Synthetic peptide
  N-term Ac
  MOD_RES (4)..(4): Alpha-Me R8-octenyl-alanine olefin amino acid connected by an all-carbon crosslinker comprising one double bond
  misc_feature (4)..(11): Crosslink between residues
  MOD_RES (11)..(11): Alpha-Me S5-pentenyl-alanine olefin amino acid connected by an all-carbon crosslinker comprising one double bond
  C-term NH2
LTFAAWWAQLAS

SEQ ID NO: 1204 - protein, 12 aa, Artificial Sequence
  Description of Artificial Sequence: Synthetic peptide
  N-term Ac
  MOD_RES (4)..(4): Alpha-Me R8-octenyl-alanine olefin amino acid connected by an all-carbon crosslinker comprising one double bond
  misc_feature (4)..(11): Crosslink between residues
  MOD_RES (11)..(11): Alpha-Me S5-pentenyl-alanine olefin amino acid connected by an all-carbon crosslinker comprising one double bond
  C-term NH2
LTFAAYWAQIAS

SEQ ID NO: 1205 - protein, 12 aa, Artificial Sequence
  Description of Artificial Sequence: Synthetic peptide
  N-term Ac
  MOD_RES (4)..(4): Alpha-Me R8-octenyl-alanine olefin amino acid connected by an all-carbon crosslinker comprising one double bond
  misc_feature (4)..(11): Crosslink between residues
  MOD_RES (10)..(10): Norleucine
  MOD_RES (11)..(11): Alpha-Me S5-pentenyl-alanine olefin amino acid connected by an all-carbon crosslinker comprising one double bond
  C-term NH2
LTFAAYWAQLAS

SEQ ID NO: 1206 - protein, 13 aa, Artificial Sequence
  Description of Artificial Sequence: Synthetic peptide
  N-term Ac
  MOD_RES (4)..(4): Alpha-Me R8-octenyl-alanine olefin amino acid connected by an all-carbon crosslinker comprising one double bond
  misc_feature (4)..(11): Crosslink between residues
  MOD_RES (11)..(11): Alpha-Me S5-pentenyl-alanine olefin amino acid connected by an all-carbon crosslinker comprising one double bond
  C-term NH2
LTFAAYWAQLASA

SEQ ID NO: 1207 - protein, 12 aa, Artificial Sequence
  Description of Artificial Sequence: Synthetic peptide
  N-term Ac
  MOD_RES (4)..(4): Alpha-Me R8-octenyl-alanine olefin amino acid connected by an all-carbon crosslinker comprising one double bond
  misc_feature (4)..(11): Crosslink between residues
  MOD_RES (11)..(11): Alpha-Me S5-pentenyl-alanine olefin amino acid connected by an all-carbon crosslinker comprising one double bond
  C-term NH2
LTFAAWWAQLAA

SEQ ID NO: 1208 - protein, 12 aa, Artificial Sequence
  Description of Artificial Sequence: Synthetic peptide
  N-term Ac
  MOD_RES (4)..(4): Alpha-Me R8-octenyl-alanine olefin amino acid connected by an all-carbon crosslinker comprising one double bond
  misc_feature (4)..(11): Crosslink between residues
  MOD_RES (11)..(11): Alpha-Me S5-pentenyl-alanine olefin amino acid connected by an all-carbon crosslinker comprising one double bond
  C-term NH2
LTFAAYWAQIAA

SEQ ID NO: 1209 - protein, 12 aa, Artificial Sequence
  Description of Artificial Sequence: Synthetic peptide
  N-term Ac
  MOD_RES (4)..(4): Alpha-Me R8-octenyl-alanine olefin amino acid connected by an all-carbon crosslinker comprising one double bond
  misc_feature (4)..(11): Crosslink between residues
  MOD_RES (10)..(10): Norleucine
  MOD_RES (11)..(11): Alpha-Me S5-pentenyl-alanine olefin amino acid connected by an all-carbon crosslinker comprising one double bond
  C-term NH2
LTFAAYWAQLAA

SEQ ID NO: 1210 - protein, 13 aa, Artificial Sequence
  Description of Artificial Sequence: Synthetic peptide
  N-term Ac
  MOD_RES (4)..(4): Alpha-Me R8-octenyl-alanine olefin amino acid connected by an all-carbon crosslinker comprising one double bond
  misc_feature (4)..(11): Crosslink between residues
  MOD_RES (11)..(11): Alpha-Me S5-pentenyl-alanine olefin amino acid connected by an all-carbon crosslinker comprising one double bond
  C-term NH2
LTFAAYWAQLAAA

SEQ ID NO: 1211 - protein, 12 aa, Artificial Sequence
  Description of Artificial Sequence: Synthetic peptide
  N-term Ac
  MOD_RES (4)..(4): Alpha-Me R8-octenyl-alanine olefin amino acid connected by an all-carbon crosslinker comprising one double bond
  misc_feature (4)..(11): Crosslink between residues
  MOD_RES (11)..(11): Alpha-Me S5-pentenyl-alanine olefin amino acid connected by an all-carbon crosslinker comprising one double bond
  C-term NH2
LTFAHWWAQLAS

SEQ ID NO: 1212 - protein, 12 aa, Artificial Sequence
  Description of Artificial Sequence: Synthetic peptide
  N-term Ac
  MOD_RES (4)..(4): Alpha-Me R8-octenyl-alanine olefin amino acid connected by an all-carbon crosslinker comprising one double bond
  misc_feature (4)..(11): Crosslink between residues
  MOD_RES (11)..(11): Alpha-Me S5-pentenyl-alanine olefin amino acid connected by an all-carbon crosslinker comprising one double bond
  C-term NH2
LTFAHRWAQLAS

SEQ ID NO: 1213 - protein, 12 aa, Artificial Sequence
  Description of Artificial Sequence: Synthetic peptide
  N-term Ac
  MOD_RES (4)..(4): Alpha-Me R8-octenyl-alanine olefin amino acid connected by an all-carbon crosslinker comprising one double bond
  misc_feature (4)..(11): Crosslink between residues
  MOD_RES (11)..(11): Alpha-Me S5-pentenyl-alanine olefin amino acid connected by an all-carbon crosslinker comprising one double bond
  C-term NH2
LTFAHKWAQLAS

SEQ ID NO: 1214 - protein, 12 aa, Artificial Sequence
  Description of Artificial Sequence: Synthetic peptide
  N-term Ac
  MOD_RES (4)..(4): Alpha-Me R8-octenyl-alanine olefin amino acid connected by an all-carbon crosslinker comprising one double bond
  misc_feature (4)..(11): Crosslink between residues
  MOD_RES (11)..(11): Alpha-Me S5-pentenyl-alanine olefin amino acid connected by an all-carbon crosslinker comprising one double bond
  C-term NH2
LTFAHYWAQLAW

SEQ ID NO: 1215 - protein, 10 aa, Artificial Sequence
  Description of Artificial Sequence: Synthetic peptide
  N-term Ac
  MOD_RES (2)..(2): Alpha-Me R8-octenyl-alanine olefin amino acid connected by an all-carbon crosslinker comprising one double bond
  misc_feature (2)..(9): Crosslink between residues
  MOD_RES (6)..(6): Abu
  MOD_RES (9)..(9): Alpha-Me S5-pentenyl-alanine olefin amino acid connected by an all-carbon crosslinker comprising one double bond
  C-term NH2
FAAYWXALAA

SEQ ID NO: 1216 - protein, 10 aa, Artificial Sequence
  Description of Artificial Sequence: Synthetic peptide
  N-term Ac
  MOD_RES (2)..(2): Alpha-Me R8-octenyl-alanine olefin amino acid connected by an all-carbon crosslinker comprising one double bond
  misc_feature (2)..(9): Crosslink between residues
  MOD_RES (3)..(3): Abu
  MOD_RES (9)..(9): Alpha-Me S5-pentenyl-alanine olefin amino acid connected by an all-carbon crosslinker comprising one double bond
  C-term NH2
FAXYWEALAA

SEQ ID NO: 1217 - protein, 14 aa, Artificial Sequence
  Description of Artificial Sequence: Synthetic peptide
  N-term Ac
  MOD_RES (1)..(1): Norleucine
  MOD_RES (5)..(5): Alpha-Me R8-octenyl-alanine olefin amino acid connected by an all-carbon crosslinker comprising no double bonds
  misc_feature (5)..(12): Crosslink between residues
  MOD_RES (12)..(12): Alpha-Me S5-pentenyl-alanine olefin amino acid connected by an all-carbon crosslinker comprising no double bonds
  C-term NH2
LPRFANYWRLLAQN

SEQ ID NO: 1218 - protein, 12 aa, Artificial Sequence
  Description of Artificial Sequence: Synthetic peptide
  N-term Ac
  MOD_RES (4)..(4): Alpha-Me R8-octenyl-alanine olefin amino acid connected by an all-carbon crosslinker comprising no double bonds
  misc_feature (4)..(11): Crosslink between residues
  MOD_RES (11)..(11): Alpha-Me S5-pentenyl-alanine olefin amino acid connected by an all-carbon crosslinker comprising no double bonds
  C-term NH2
TSFAHYWAQLAS

SEQ ID NO: 1219 - protein, 12 aa, Artificial Sequence
  Description of Artificial Sequence: Synthetic peptide
  N-term Ac
  MOD_RES (4)..(4): Alpha-Me R8-octenyl-alanine olefin amino acid connected by an all-carbon crosslinker comprising no double bonds
  misc_feature (4)..(11): Crosslink between residues
  MOD_RES (11)..(11): Alpha-Me S5-pentenyl-alanine olefin amino acid connected by an all-carbon crosslinker comprising no double bonds
  C-term NH2
LTFAAYWAQLAS

SEQ ID NO: 1220 - protein, 12 aa, Artificial Sequence
  Description of Artificial Sequence: Synthetic peptide
  N-term Ac
  MOD_RES (4)..(4): Alpha-Me R8-octenyl-alanine olefin amino acid connected by an all-carbon crosslinker comprising one double bond
  misc_feature (4)..(11): Crosslink between residues
  MOD_RES (11)..(11): Alpha-Me S5-pentenyl-alanine olefin amino acid connected by an all-carbon crosslinker comprising one double bond
  C-term NH2
HTFAHYWAQLAS

SEQ ID NO: 1221 - protein, 12 aa, Artificial Sequence
  Description of Artificial Sequence: Synthetic peptide
  N-term Ac
  MOD_RES (4)..(4): Alpha-Me R8-octenyl-alanine olefin amino acid connected by an all-carbon crosslinker comprising one double bond
  misc_feature (4)..(11): Crosslink between residues
  MOD_RES (11)..(11): Alpha-Me S5-pentenyl-alanine olefin amino acid connected by an all-carbon crosslinker comprising one double bond
  C-term NH2
LHFAHYWAQLAS

SEQ ID NO: 1222 - protein, 12 aa, Artificial Sequence
  Description of Artificial Sequence: Synthetic peptide
  N-term Ac
  MOD_RES (4)..(4): Alpha-Me R8-octenyl-alanine olefin amino acid connected by an all-carbon crosslinker comprising one double bond
  misc_feature (4)..(11): Crosslink between residues
  MOD_RES (11)..(11): Alpha-Me S5-pentenyl-alanine olefin amino acid connected by an all-carbon crosslinker comprising one double bond
  C-term NH2
LTFAHHWAQLAS

SEQ ID NO: 1223 - protein, 12 aa, Artificial Sequence
  Description of Artificial Sequence: Synthetic peptide
  N-term Ac
  MOD_RES (4)..(4): Alpha-Me R8-octenyl-alanine olefin amino acid connected by an all-carbon crosslinker comprising one double bond
  misc_feature (4)..(11): Crosslink between residues
  MOD_RES (11)..(11): Alpha-Me S5-pentenyl-alanine olefin amino acid connected by an all-carbon crosslinker comprising one double bond
  C-term NH2
LTFAHYWHQLAS

SEQ ID NO: 1224 - protein, 12 aa, Artificial Sequence
  Description of Artificial Sequence: Synthetic peptide
  N-term Ac
  MOD_RES (4)..(4): Alpha-Me R8-octenyl-alanine olefin amino acid connected by an all-carbon crosslinker comprising one double bond
  misc_feature (4)..(11): Crosslink between residues
  MOD_RES (11)..(11): Alpha-Me S5-pentenyl-alanine olefin amino acid connected by an all-carbon crosslinker comprising one double bond
  C-term NH2
LTFAHYWAHLAS

SEQ ID NO: 1225 - protein, 12 aa, Artificial Sequence
  Description of Artificial Sequence: Synthetic peptide
  N-term Ac
  MOD_RES (4)..(4): Alpha-Me R8-octenyl-alanine olefin amino acid connected by an all-carbon crosslinker comprising one double bond
  misc_feature (4)..(11): Crosslink between residues
  MOD_RES (11)..(11): Alpha-Me S5-pentenyl-alanine olefin amino acid connected by an all-carbon crosslinker comprising one double bond
  C-term NH2
LTFAHYWAQLAH

SEQ ID NO: 1226 - protein, 12 aa, Artificial Sequence
  Description of Artificial Sequence: Synthetic peptide
  N-term Ac
  MOD_RES (4)..(4): Alpha-Me R8-octenyl-alanine olefin amino acid connected by an all-carbon crosslinker comprising one double bond
  misc_feature (4)..(11): Crosslink between residues
  MOD_RES (11)..(11): Alpha-Me S5-pentenyl-alanine olefin amino acid connected by an all-carbon crosslinker comprising one double bond
  C-term NHPr
LTFAHYWAQLAS

SEQ ID NO: 1227 - protein, 12 aa, Artificial Sequence
  Description of Artificial Sequence: Synthetic peptide
  N-term Ac
  MOD_RES (4)..(4): Alpha-Me R8-octenyl-alanine olefin amino acid connected by an all-carbon crosslinker comprising one double bond
  misc_feature (4)..(11): Crosslink between residues
  MOD_RES (11)..(11): Alpha-Me S5-pentenyl-alanine olefin amino acid connected by an all-carbon crosslinker comprising one double bond
  C-term NHsBu
LTFAHYWAQLAS

SEQ ID NO: 1228 - protein, 12 aa, Artificial Sequence
  Description of Artificial Sequence: Synthetic peptide
  N-term Ac
  MOD_RES (4)..(4): Alpha-Me R8-octenyl-alanine olefin amino acid connected by an all-carbon crosslinker comprising one double bond
  misc_feature (4)..(11): Crosslink between residues
  MOD_RES (11)..(11): Alpha-Me S5-pentenyl-alanine olefin amino acid connected by an all-carbon crosslinker comprising one double bond
  C-term NHiBu
LTFAHYWAQLAS

SEQ ID NO: 1229 - protein, 12 aa, Artificial Sequence
  Description of Artificial Sequence: Synthetic peptide
  N-term Ac
  MOD_RES (4)..(4): Alpha-Me R8-octenyl-alanine olefin amino acid connected by an all-carbon crosslinker comprising one double bond
  misc_feature (4)..(11): Crosslink between residues
  MOD_RES (11)..(11): Alpha-Me S5-pentenyl-alanine olefin amino acid connected by an all-carbon crosslinker comprising one double bond
  C-term NHBn
LTFAHYWAQLAS

SEQ ID NO: 1230 - protein, 12 aa, Artificial Sequence
  Description of Artificial Sequence: Synthetic peptide
  N-term Ac
  MOD_RES (4)..(4): Alpha-Me R8-octenyl-alanine olefin amino acid connected by an all-carbon crosslinker comprising one double bond
  misc_feature (4)..(11): Crosslink between residues
  MOD_RES (11)..(11): Alpha-Me S5-pentenyl-alanine olefin amino acid connected by an all-carbon crosslinker comprising one double bond
  C-term NHPe
LTFAHYWAQLAS

SEQ ID NO: 1231 - protein, 12 aa, Artificial Sequence
  Description of Artificial Sequence: Synthetic peptide
  N-term Ac
  MOD_RES (4)..(4): Alpha-Me R8-octenyl-alanine olefin amino acid connected by an all-carbon crosslinker comprising one double bond
  misc_feature (4)..(11): Crosslink between residues
  MOD_RES (11)..(11): Alpha-Me S5-pentenyl-alanine olefin amino acid connected by an all-carbon crosslinker comprising one double bond
  C-term NHChx
LTFAHYWAQLAS

SEQ ID NO: 1232 - protein, 12 aa, Artificial Sequence
  Description of Artificial Sequence: Synthetic peptide
  N-term Ac
  MOD_RES (4)..(4): Alpha-Me R8-octenyl-alanine olefin amino acid connected by an all-carbon crosslinker comprising one double bond
  misc_feature (4)..(11): Crosslink between residues
  MOD_RES (11)..(11): Alpha-Me S5-pentenyl-alanine olefin amino acid connected by an all-carbon crosslinker comprising one double bond
  C-term NH2
ETFAAYWAQLAS

SEQ ID NO: 1233 - protein, 12 aa, Artificial Sequence
  Description of Artificial Sequence: Synthetic peptide
  N-term Ac
  MOD_RES (4)..(4): Alpha-Me R8-octenyl-alanine olefin amino acid connected by an all-carbon crosslinker comprising one double bond
  misc_feature (4)..(11): Crosslink between residues
  MOD_RES (11)..(11): Alpha-Me S5-pentenyl-alanine olefin amino acid connected by an all-carbon crosslinker comprising one double bond
  C-term NH2
STFAAYWAQLAS

SEQ ID NO: 1234 - protein, 12 aa, Artificial Sequence
  Description of Artificial Sequence: Synthetic peptide
  N-term Ac
  MOD_RES (4)..(4): Alpha-Me R8-octenyl-alanine olefin amino acid connected by an all-carbon crosslinker comprising one double bond
  misc_feature (4)..(11): Crosslink between residues
  MOD_RES (11)..(11): Alpha-Me S5-pentenyl-alanine olefin amino acid connected by an all-carbon crosslinker comprising one double bond
  C-term NH2
LEFAAYWAQLAS

SEQ ID NO: 1235 - protein, 12 aa, Artificial Sequence
  Description of Artificial Sequence: Synthetic peptide
  N-term Ac
  MOD_RES (4)..(4): Alpha-Me R8-octenyl-alanine olefin amino acid connected by an all-carbon crosslinker comprising one double bond
  misc_feature (4)..(11): Crosslink between residues
  MOD_RES (11)..(11): Alpha-Me S5-pentenyl-alanine olefin amino acid connected by an all-carbon crosslinker comprising one double bond
  C-term NH2
LSFAAYWAQLAS

SEQ ID NO: 1236 - protein, 12 aa, Artificial Sequence
  Description of Artificial Sequence: Synthetic peptide
  N-term Ac
  MOD_RES (4)..(4): Alpha-Me R8-octenyl-alanine olefin amino acid connected by an all-carbon crosslinker comprising one double bond
  misc_feature (4)..(11): Crosslink between residues
  MOD_RES (11)..(11): Alpha-Me S5-pentenyl-alanine olefin amino acid connected by an all-carbon crosslinker comprising one double bond
  C-term NH2
LTFAEYWAQLAS

SEQ ID NO: 1237 - protein, 12 aa, Artificial Sequence
  Description of Artificial Sequence: Synthetic peptide
  N-term Ac
  MOD_RES (4)..(4): Alpha-Me R8-octenyl-alanine olefin amino acid connected by an all-carbon crosslinker comprising one double bond
  misc_feature (4)..(11): Crosslink between residues
  MOD_RES (11)..(11): Alpha-Me S5-pentenyl-alanine olefin amino acid connected by an all-carbon crosslinker comprising one double bond
  C-term NH2
LTFASYWAQLAS

SEQ ID NO: 1238 - protein, 12 aa, Artificial Sequence
  Description of Artificial Sequence: Synthetic peptide
  N-term Ac
  MOD_RES (4)..(4): Alpha-Me R8-octenyl-alanine olefin amino acid connected by an all-carbon crosslinker comprising one double bond
  misc_feature (4)..(11): Crosslink between residues
  MOD_RES (11)..(11): Alpha-Me S5-pentenyl-alanine olefin amino acid connected by an all-carbon crosslinker comprising one double bond
  C-term NH2
LTFAAYWEQLAS

SEQ ID NO: 1239 - protein, 12 aa, Artificial Sequence
  Description of Artificial Sequence: Synthetic peptide
  N-term Ac
  MOD_RES (4)..(4): Alpha-Me R8-octenyl-alanine olefin amino acid connected by an all-carbon crosslinker comprising one double bond
  misc_feature (4)..(11): Crosslink between residues
  MOD_RES (11)..(11): Alpha-Me S5-pentenyl-alanine olefin amino acid connected by an all-carbon crosslinker comprising one double bond
  C-term NH2
LTFAAYWAELAS

SEQ ID NO: 1240 - protein, 12 aa, Artificial Sequence
  Description of Artificial Sequence: Synthetic peptide
  N-term Ac
  MOD_RES (4)..(4): Alpha-Me R8-octenyl-alanine olefin amino acid connected by an all-carbon crosslinker comprising one double bond
  misc_feature (4)..(11): Crosslink between residues
  MOD_RES (11)..(11): Alpha-Me S5-pentenyl-alanine olefin amino acid connected by an all-carbon crosslinker comprising one double bond
  C-term NH2
LTFAAYWASLAS

SEQ ID NO: 1241 - protein, 12 aa, Artificial Sequence
  Description of Artificial Sequence: Synthetic peptide
  N-term Ac
  MOD_RES (4)..(4): Alpha-Me R8-octenyl-alanine olefin amino acid connected by an all-carbon crosslinker comprising one double bond
  misc_feature (4)..(11): Crosslink between residues
  MOD_RES (11)..(11): Alpha-Me S5-pentenyl-alanine olefin amino acid connected by an all-carbon crosslinker comprising one double bond
  C-term NH2
LTFAAYWAQLAE

SEQ ID NO: 1242 - protein, 12 aa, Artificial Sequence
  Description of Artificial Sequence: Synthetic peptide
  N-term Ac
  MOD_RES (3)..(3): Phe-2CN
  MOD_RES (4)..(4): Alpha-Me R8-octenyl-alanine olefin amino acid connected by an all-carbon crosslinker comprising one double bond
  misc_feature (4)..(11): Crosslink between residues
  MOD_RES (11)..(11): Alpha-Me S5-pentenyl-alanine olefin amino acid connected by an all-carbon crosslinker comprising one double bond
  C-term NH2
LTFAHYWAQLAS

SEQ ID NO: 1243 - protein, 12 aa, Artificial Sequence
  Description of Artificial Sequence: Synthetic peptide
  N-term Ac
  MOD_RES (3)..(3): 3-Chloro-Phe
  MOD_RES (4)..(4): Alpha-Me R8-octenyl-alanine olefin amino acid connected by an all-carbon crosslinker comprising one double bond
  misc_feature (4)..(11): Crosslink between residues
  MOD_RES (11)..(11): Alpha-Me S5-pentenyl-alanine olefin amino acid connected by an all-carbon crosslinker comprising one double bond
  C-term NH2
LTFAHYWAQLAS

SEQ ID NO: 1244 - protein, 12 aa, Artificial Sequence
  Description of Artificial Sequence: Synthetic peptide
  N-term Ac
  MOD_RES (3)..(3): 3,3-di-Phe
  MOD_RES (4)..(4): Alpha-Me R8-octenyl-alanine olefin amino acid connected by an all-carbon crosslinker comprising one double bond
  misc_feature (4)..(11): Crosslink between residues
  MOD_RES (11)..(11): Alpha-Me S5-pentenyl-alanine olefin amino acid connected by an all-carbon crosslinker comprising one double bond
  C-term NH2
LTXAHYWAQLAS

SEQ ID NO: 1245 - protein, 12 aa, Artificial Sequence
  Description of Artificial Sequence: Synthetic peptide
  N-term Ac
  MOD_RES (4)..(4): Alpha-Me R8-octenyl-alanine olefin amino acid connected by an all-carbon crosslinker comprising one double bond
  misc_feature (4)..(11): Crosslink between residues
  MOD_RES (10)..(10): Tert-butyl-Gly
  MOD_RES (11)..(11): Alpha-Me S5-pentenyl-alanine olefin amino acid connected by an all-carbon crosslinker comprising one double bond
  C-term NH2
LTFAHYWAQGAS

SEQ ID NO: 1246 - protein, 10 aa, Artificial Sequence
  Description of Artificial Sequence: Synthetic peptide
  N-term Ac
  MOD_RES (2)..(2): Alpha-Me R8-octenyl-alanine olefin amino acid connected by an all-carbon crosslinker comprising one double bond
  misc_feature (2)..(9): Crosslink between residues
  MOD_RES (5)..(5): 6cl-Trp
  MOD_RES (9)..(9): Alpha-Me S5-pentenyl-alanine olefin amino acid connected by an all-carbon crosslinker comprising one double bond
  C-term NH2
FAAYWEALAA

SEQ ID NO: 1247 - protein, 10 aa, Artificial Sequence
  Description of Artificial Sequence: Synthetic peptide
  N-term Ac
  MOD_RES (2)..(2): Alpha-Me R8-octenyl-alanine olefin amino acid connected by an all-carbon crosslinker comprising one double bond
  misc_feature (2)..(9): Crosslink between residues
  MOD_RES (5)..(5): dl6br-Trp
  MOD_RES (9)..(9): Alpha-Me S5-pentenyl-alanine olefin amino acid connected by an all-carbon crosslinker comprising one double bond
  C-term NH2
FAAYWEALAA

SEQ ID NO: 1248 - protein, 10 aa, Artificial Sequence
  Description of Artificial Sequence: Synthetic peptide
  N-term Ac
  MOD_RES (2)..(2): Alpha-Me R8-octenyl-alanine olefin amino acid connected by an all-carbon crosslinker comprising one double bond
  misc_feature (2)..(9): Crosslink between residues
  MOD_RES (5)..(5): dl6f-Trp
  MOD_RES (9)..(9): Alpha-Me S5-pentenyl-alanine olefin amino acid connected by an all-carbon crosslinker comprising one double bond
  C-term NH2
FAAYWEALAA

SEQ ID NO: 1249 - protein, 10 aa, Artificial Sequence
  Description of Artificial Sequence: Synthetic peptide
  N-term Ac
  MOD_RES (2)..(2): Alpha-Me R8-octenyl-alanine olefin amino acid connected by an all-carbon crosslinker comprising one double bond
  misc_feature (2)..(9): Crosslink between residues
  MOD_RES (5)..(5): dl4m-Trp
  MOD_RES (9)..(9): Alpha-Me S5-pentenyl-alanine olefin amino acid connected by an all-carbon crosslinker comprising one double bond
  C-term NH2
FAAYWEALAA

SEQ ID NO: 1250 - protein, 10 aa, Artificial Sequence
  Description of Artificial Sequence: Synthetic peptide
  N-term Ac
  MOD_RES (2)..(2): Alpha-Me R8-octenyl-alanine olefin amino acid connected by an all-carbon crosslinker comprising one double bond
  misc_feature (2)..(9): Crosslink between residues
  MOD_RES (5)..(5): dl5cl-Trp
  MOD_RES (9)..(9): Alpha-Me S5-pentenyl-alanine olefin amino acid connected by an all-carbon crosslinker comprising one double bond
  C-term NH2
FAAYWEALAA

SEQ ID NO: 1251 - protein, 10 aa, Artificial Sequence
  Description of Artificial Sequence: Synthetic peptide
  N-term Ac
  MOD_RES (2)..(2): Alpha-Me R8-octenyl-alanine olefin amino acid connected by an all-carbon crosslinker comprising one double bond
  misc_feature (2)..(9): Crosslink between residues
  MOD_RES (5)..(5): dl7m-Trp
  MOD_RES (9)..(9): Alpha-Me S5-pentenyl-alanine olefin amino acid connected by an all-carbon crosslinker comprising one double bond
  C-term NH2
FAAYWEALAA

SEQ ID NO: 1252 - protein, 12 aa, Artificial Sequence
  Description of Artificial Sequence: Synthetic peptide
  N-term Ac
  MOD_RES (4)..(4): Alpha-Me R8-octenyl-alanine olefin amino acid connected by an all-carbon crosslinker comprising no double bonds
  misc_feature (4)..(11): Crosslink between residues
  MOD_RES (11)..(11): Alpha-Me S5-pentenyl-alanine olefin amino acid connected by an all-carbon crosslinker comprising no double bonds
  C-term NH2
LTFAHYWAQLAA

SEQ ID NO: 1253 - protein, 12 aa, Artificial Sequence
  Description of Artificial Sequence: Synthetic peptide
  N-term Ac
  MOD_RES (4)..(4): Alpha-Me R8-octenyl-alanine olefin amino acid connected by an all-carbon crosslinker comprising one double bond
  misc_feature (4)..(11): Crosslink between residues
  MOD_RES (6)..(6): Cou
  MOD_RES (11)..(11): Alpha-Me S5-pentenyl-alanine olefin amino acid connected by an all-carbon crosslinker comprising one double bond
  C-term NH2
LTFAHXWAQLAS

SEQ ID NO: 1254 - protein, 12 aa, Artificial Sequence
  Description of Artificial Sequence: Synthetic peptide
  N-term Ac
  MOD_RES (6)..(6): Cou
  C-term NH2
LTFEHXWAQLTS

SEQ ID NO: 1255 - protein, 12 aa, Artificial Sequence
  Description of Artificial Sequence: Synthetic peptide
  N-term Ac
  MOD_RES (4)..(4): Alpha-Me R8-octenyl-alanine olefin amino acid connected by an all-carbon crosslinker comprising one double bond
  misc_feature (4)..(11): Crosslink between residues
  MOD_RES (6)..(6): Cou
  MOD_RES (11)..(11): Alpha-Me S5-pentenyl-alanine olefin amino acid connected by an all-carbon crosslinker comprising one double bond
  C-term NH2
LTAAHXWAQLAS

SEQ ID NO: 1256 - protein, 11 aa, Artificial Sequence
  Description of Artificial Sequence: Synthetic peptide
  N-term Ac
  MOD_RES (2)..(2): Alpha-Me R8-octenyl-alanine olefin amino acid connected by an all-carbon crosslinker comprising one double bond
  misc_feature (2)..(9): Crosslink between residues
  MOD_RES (9)..(9): Alpha-Me S5-pentenyl-alanine olefin amino acid connected by an all-carbon crosslinker comprising one double bond
  MOD_RES (10)..(10): Abu
  C-term NH2
FAAYWEALAXA

SEQ ID NO: 1257 - protein, 11 aa, Artificial Sequence
  Description of Artificial Sequence: Synthetic peptide
  N-term Ac
  MOD_RES (2)..(2): Alpha-Me R8-octenyl-alanine olefin amino acid connected by an all-carbon crosslinker comprising one double bond
  misc_feature (2)..(9): Crosslink between residues
  MOD_RES (9)..(9): Alpha-Me S5-pentenyl-alanine olefin amino acid connected by an all-carbon crosslinker comprising one double bond
  C-term NH2
FAAYWEAIAAA

SEQ ID NO: 1258 - protein, 11 aa, Artificial Sequence
  Description of Artificial Sequence: Synthetic peptide
  N-term Ac
  MOD_RES (2)..(2): Alpha-Me R8-octenyl-alanine olefin amino acid connected by an all-carbon crosslinker comprising one double bond
  misc_feature (2)..(9): Crosslink between residues
  MOD_RES (8)..(8): Norleucine
  MOD_RES (9)..(9): Alpha-Me S5-pentenyl-alanine olefin amino acid connected by an all-carbon crosslinker comprising one double bond
  C-term NH2
FAAYWEALAAA

SEQ ID NO: 1259 - protein, 11 aa, Artificial Sequence
  Description of Artificial Sequence: Synthetic peptide
  N-term Ac
  MOD_RES (2)..(2): Alpha-Me R8-octenyl-alanine olefin amino acid connected by an all-carbon crosslinker comprising one double bond
  misc_feature (2)..(9): Crosslink between residues
  MOD_RES (7)..(7): Alpha-Me-Leu
  MOD_RES (9)..(9): Alpha-Me S5-pentenyl-alanine olefin amino acid connected by an all-carbon crosslinker comprising one double bond
  C-term NH2
FAAYWELLAAA

SEQ ID NO: 1260 - protein, 11 aa, Artificial Sequence
  Description of Artificial Sequence: Synthetic peptide
  N-term Ac
  MOD_RES (2)..(2): Alpha-Me R8-octenyl-alanine olefin amino acid connected by an all-carbon crosslinker comprising one double bond
  misc_feature (2)..(9): Crosslink between residues
  MOD_RES (9)..(9): Alpha-Me S5-pentenyl-alanine olefin amino acid connected by an all-carbon crosslinker comprising one double bond
  C-term NH2
FAAYWQALAAA

SEQ ID NO: 1261 - protein, 11 aa, Artificial Sequence
  Description of Artificial Sequence: Synthetic peptide
  N-term Ac
  MOD_RES (2)..(2): Alpha-Me R8-octenyl-alanine olefin amino acid connected by an all-carbon crosslinker comprising one double bond
  misc_feature (2)..(9): Crosslink between residues
  MOD_RES (9)..(9): Alpha-Me S5-pentenyl-alanine olefin amino acid connected by an all-carbon crosslinker comprising one double bond
  C-term NH2
FAAYWAALAAA

SEQ ID NO: 1262 - protein, 11 aa, Artificial Sequence
  Description of Artificial Sequence: Synthetic peptide
  N-term Ac
  MOD_RES (2)..(2): Alpha-Me R8-octenyl-alanine olefin amino acid connected by an all-carbon crosslinker comprising one double bond
  misc_feature (2)..(9): Crosslink between residues
  MOD_RES (6)..(6): Abu
  MOD_RES (9)..(9): Alpha-Me S5-pentenyl-alanine olefin amino acid connected by an all-carbon crosslinker comprising one double bond
  C-term NH2
FAAYWXALAAA

SEQ ID NO: 1263 - protein, 11 aa, Artificial Sequence
  Description of Artificial Sequence: Synthetic peptide
  N-term Ac
  MOD_RES (2)..(2): Alpha-Me R8-octenyl-alanine olefin amino acid connected by an all-carbon crosslinker comprising one double bond
  misc_feature (2)..(9): Crosslink between residues
  MOD_RES (6)..(6): Norleucine
  MOD_RES (9)..(9): Alpha-Me S5-pentenyl-alanine olefin amino acid connected by an all-carbon crosslinker comprising one double bond
  C-term NH2
FAAYWLALAAA

SEQ ID NO: 1264 - protein, 11 aa, Artificial Sequence
  Description of Artificial Sequence: Synthetic peptide
  N-term Ac
  MOD_RES (2)..(2): Alpha-Me R8-octenyl-alanine olefin amino acid connected by an all-carbon crosslinker comprising one double bond
  misc_feature (2)..(9): Crosslink between residues
  MOD_RES (3)..(3): Abu
  MOD_RES (9)..(9): Alpha-Me S5-pentenyl-alanine olefin amino acid connected by an all-carbon crosslinker comprising one double bond
  C-term NH2
FAXYWEALAAA

SEQ ID NO: 1265 - protein, 11 aa, Artificial Sequence
  Description of Artificial Sequence: Synthetic peptide
  N-term Ac
  MOD_RES (2)..(2): Alpha-Me R8-octenyl-alanine olefin amino acid connected by an all-carbon crosslinker comprising one double bond
  misc_feature (2)..(9): Crosslink between residues
  MOD_RES (3)..(3): Norleucine
  MOD_RES (9)..(9): Alpha-Me S5-pentenyl-alanine olefin amino acid connected by an all-carbon crosslinker comprising one double bond
  C-term NH2
FALYWEALAAA

SEQ ID NO: 1266 - protein, 11 aa, Artificial Sequence
  Description of Artificial Sequence: Synthetic peptide
  N-term Ac
  MOD_RES (2)..(2): Alpha-Me R8-octenyl-alanine olefin amino acid connected by an all-carbon crosslinker comprising one double bond
  misc_feature (2)..(9): Crosslink between residues
  MOD_RES (9)..(9): Alpha-Me S5-pentenyl-alanine olefin amino acid connected by an all-carbon crosslinker comprising one double bond
  C-term NH2
FAFYWEALAAA

SEQ ID NO: 1267 - protein, 12 aa, Artificial Sequence
  Description of Artificial Sequence: Synthetic peptide
  N-term Ac
  MOD_RES (4)..(4): Alpha-Me R8-octenyl-alanine olefin amino acid connected by an all-carbon crosslinker comprising one double bond
  misc_feature (4)..(11): Crosslink between residues
  MOD_RES (10)..(10): hLeu
  MOD_RES (11)..(11): Alpha-Me S5-pentenyl-alanine olefin amino acid connected by an all-carbon crosslinker comprising one double bond
  C-term NH2
LTFAHYWAQLAS

SEQ ID NO: 1268 - protein, 12 aa, Artificial Sequence
  Description of Artificial Sequence: Synthetic peptide
  N-term Ac
  MOD_RES (4)..(4): Alpha-Me R8-octenyl-alanine olefin amino acid connected by an all-carbon crosslinker comprising one double bond
  misc_feature (4)..(11): Crosslink between residues
  MOD_RES (10)..(10): Adamantyl-Gly
  MOD_RES (11)..(11): Alpha-Me S5-pentenyl-alanine olefin amino acid connected by an all-carbon crosslinker comprising one double bond
  C-term NH2
LTFAHYWAQGAS

SEQ ID NO: 1269 - protein, 12 aa, Artificial Sequence
  Description of Artificial Sequence: Synthetic peptide
  N-term Ac
  MOD_RES (4)..(4): Alpha-Me R8-octenyl-alanine olefin amino acid connected by an all-carbon crosslinker comprising one double bond
  misc_feature (4)..(11): Crosslink between residues
  MOD_RES (10)..(10): Indanyl-Gly
  MOD_RES (11)..(11): Alpha-Me S5-pentenyl-alanine olefin amino acid connected by an all-carbon crosslinker comprising one double bond
  C-term NH2
LTFAHYWAQGAS

SEQ ID NO: 1270 - protein, 11 aa, Artificial Sequence
  Description of Artificial Sequence: Synthetic peptide
  N-term Ac
  MOD_RES (2)..(2): Alpha-Me R8-octenyl-alanine olefin amino acid connected by an all-carbon crosslinker comprising one double bond
  misc_feature (2)..(9): Crosslink between residues
  MOD_RES (9)..(9): Alpha-Me S5-pentenyl-alanine olefin amino acid connected by an all-carbon crosslinker comprising one double bond
  C-term NH2
FAAYWAQLAAA

SEQ ID NO: 1271 - protein, 12 aa, Artificial Sequence
  Description of Artificial Sequence: Synthetic peptide
  N-term Ac
  MOD_RES (4)..(4): Alpha-Me R8-octenyl-alanine olefin amino acid connected by an all-carbon crosslinker comprising one double bond
  misc_feature (4)..(11): Crosslink between residues
  MOD_RES (11)..(11): Alpha-Me S5-pentenyl-alanine olefin amino acid connected by an all-carbon crosslinker comprising one double bond
  C-term NH2
LTFAALWAQLAQ

SEQ ID NO: 1272 - protein, 11 aa, Artificial Sequence
  Description of Artificial Sequence: Synthetic peptide
  N-term Ac
  MOD_RES (2)..(2): Alpha-Me R8-octenyl-alanine olefin amino acid connected by an all-carbon crosslinker comprising one double bond
  misc_feature (2)..(9): Crosslink between residues
  MOD_RES (9)..(9): Alpha-Me S5-pentenyl-alanine olefin amino acid connected by an all-carbon crosslinker comprising one double bond
  C-term NH2
FAAYWEALAAA

SEQ ID NO: 1273 - protein, 11 aa, Artificial Sequence
  Description of Artificial Sequence: Synthetic peptide
  N-term Ac
  MOD_RES (2)..(2): Alpha-Me R8-octenyl-alanine olefin amino acid connected by an all-carbon crosslinker comprising one double bond
  misc_feature (2)..(9): Crosslink between residues
  MOD_RES (7)..(7): Norleucine
  MOD_RES (9)..(9): Alpha-Me S5-pentenyl-alanine olefin amino acid connected by an all-carbon crosslinker comprising one double bond
  C-term NH2
FAAYWELLAAA

SEQ ID NO: 1274 - protein, 10 aa, Artificial Sequence
  Description of Artificial Sequence: Synthetic peptide
  N-term Ac
  MOD_RES (2)..(2): Alpha-Me R8-octenyl-alanine olefin amino acid connected by an all-carbon crosslinker comprising one double bond
  misc_feature (2)..(9): Crosslink between residues
  MOD_RES (7)..(7): 2-aminoisobutyric acid
  MOD_RES (9)..(9): Alpha-Me S5-pentenyl-alanine olefin amino acid connected by an all-carbon crosslinker comprising one double bond
  MOD_RES (10)..(10): Abu
  C-term NH2
FAAYWEXLAX

SEQ ID NO: 1275 - protein, 10 aa, Artificial Sequence
  Description of Artificial Sequence: Synthetic peptide
  N-term Ac
  MOD_RES (2)..(2): Alpha-Me R8-octenyl-alanine olefin amino acid connected by an all-carbon crosslinker comprising one double bond
  misc_feature (2)..(9): Crosslink between residues
  MOD_RES (7)..(7): Norleucine
  MOD_RES (9)..(9): Alpha-Me S5-pentenyl-alanine olefin amino acid connected by an all-carbon crosslinker comprising one double bond
  MOD_RES (10)..(10): Abu
  C-term NH2
FAAYWELLAX

SEQ ID NO: 1276 - protein, 10 aa, Artificial Sequence
  Description of Artificial Sequence: Synthetic peptide
  N-term Ac
  MOD_RES (2)..(2): Alpha-Me R8-octenyl-alanine olefin amino acid connected by an all-carbon crosslinker comprising one double bond
  misc_feature (2)..(9): Crosslink between residues
  MOD_RES (9)..(9): Alpha-Me S5-pentenyl-alanine olefin amino acid connected by an all-carbon crosslinker comprising one double bond
  MOD_RES (10)..(10): Abu
  C-term NH2
FAAYWEALAX

SEQ ID NO: 1277 - protein, 11 aa, Artificial Sequence
  Description of Artificial Sequence: Synthetic peptide
  N-term Ac
  MOD_RES (2)..(2): Alpha-Me R8-octenyl-alanine olefin amino acid connected by an all-carbon crosslinker comprising one double bond
  misc_feature (2)..(9): Crosslink between residues
  MOD_RES (7)..(7): Ac3c
  MOD_RES (9)..(9): Alpha-Me S5-pentenyl-alanine olefin amino acid connected by an all-carbon crosslinker comprising one double bond
  MOD_RES (10)..(10): Abu
  C-term NH2
FAAYWEXLAXA

SEQ ID NO: 1278 - protein, 11 aa, Artificial Sequence
  Description of Artificial Sequence: Synthetic peptide
  N-term Ac
  MOD_RES (2)..(2): Alpha-Me R8-octenyl-alanine olefin amino acid connected by an all-carbon crosslinker comprising one double bond
  misc_feature (2)..(9): Crosslink between residues
  MOD_RES (7)..(7): Ac3c
  MOD_RES (9)..(9): Alpha-Me S5-pentenyl-alanine olefin amino acid connected by an all-carbon crosslinker comprising one double bond
  MOD_RES (10)..(10): Norleucine
  C-term NH2
FAAYWEXLALA

SEQ ID NO: 1279 - protein, 12 aa, Artificial Sequence
  Description of Artificial Sequence: Synthetic peptide
  N-term H
  MOD_RES (4)..(4): Alpha-Me R8-octenyl-alanine olefin amino acid connected by an all-carbon crosslinker comprising one double bond
  misc_feature (4)..(11): Crosslink between residues
  MOD_RES (11)..(11): Alpha-Me S5-pentenyl-alanine olefin amino acid connected by an all-carbon crosslinker comprising one double bond
  C-term NH2
LTFAAYWAQLAS

SEQ ID NO: 1280 - protein, 12 aa, Artificial Sequence
  Description of Artificial Sequence: Synthetic peptide
  N-term mdPEG3
  MOD_RES (4)..(4): Alpha-Me R8-octenyl-alanine olefin amino acid connected by an all-carbon crosslinker comprising one double bond
  misc_feature (4)..(11): Crosslink between residues
  MOD_RES (11)..(11): Alpha-Me S5-pentenyl-alanine olefin amino acid connected by an all-carbon crosslinker comprising one double bond
  C-term NH2
LTFAAYWAQLAS

SEQ ID NO: 1281 - protein, 12 aa, Artificial Sequence
  Description of Artificial Sequence: Synthetic peptide
  N-term mdPEG7
  MOD_RES (4)..(4): Alpha-Me R8-octenyl-alanine olefin amino acid connected by an all-carbon crosslinker comprising one double bond
  misc_feature (4)..(11): Crosslink between residues
  MOD_RES (11)..(11): Alpha-Me S5-pentenyl-alanine olefin amino acid connected by an all-carbon crosslinker comprising one double bond
  C-term NH2
LTFAAYWAQLAS

SEQ ID NO: 1282 - protein, 10 aa, Artificial Sequence
  Description of Artificial Sequence: Synthetic peptide
  N-term Ac
  MOD_RES (2)..(2): Alpha-Me R8-octenyl-alanine olefin amino acid connected by an all-carbon crosslinker comprising one double bond
  misc_feature (2)..(9): Crosslink between residues
  MOD_RES (4)..(4): Pmp
  MOD_RES (5)..(5): Et6cl-Trp
  MOD_RES (9)..(9): Alpha-Me S5-pentenyl-alanine olefin amino acid connected by an all-carbon crosslinker comprising one double bond
  C-term NH2
FAAXWEALAA

SEQ ID NO: 1283 - protein, 12 aa, Artificial Sequence
  Description of Artificial Sequence: Synthetic peptide
  N-term Ac
  MOD_RES (3)..(3): 3-Chloro-Phe
  MOD_RES (4)..(4): Alpha-Me R8-octenyl-alanine olefin amino acid connected by an all-carbon crosslinker comprising one double bond
  misc_feature (4)..(11): Crosslink between residues
  MOD_RES (11)..(11): Alpha-Me S5-pentenyl-alanine olefin amino acid connected by an all-carbon crosslinker comprising one double bond
  C-term NH2
LTFAAYWAQLAS

SEQ ID NO: 1284 - protein, 12 aa, Artificial Sequence
  Description of Artificial Sequence: Synthetic peptide
  N-term Ac
  MOD_RES (3)..(3): 3-Chloro-Phe
  MOD_RES (4)..(4): Alpha-Me R8-octenyl-alanine olefin amino acid connected by an all-carbon crosslinker comprising one double bond
  misc_feature (4)..(11): Crosslink between residues
  MOD_RES (11)..(11): Alpha-Me S5-pentenyl-alanine olefin amino acid connected by an all-carbon crosslinker comprising one double bond
  C-term NH2
LTFAHYWAQLAA

SEQ ID NO: 1285 - protein, 12 aa, Artificial Sequence
  Description of Artificial Sequence: Synthetic peptide
  N-term Ac
  MOD_RES (3)..(3): 3-Chloro-Phe
  MOD_RES (4)..(4): Alpha-Me R8-octenyl-alanine olefin amino acid connected by an all-carbon crosslinker comprising one double bond
  misc_feature (4)..(11): Crosslink between residues
  MOD_RES (11)..(11): Alpha-Me S5-pentenyl-alanine olefin amino acid connected by an all-carbon crosslinker comprising one double bond
  C-term NH2
LTFAHYWWQLAS

SEQ ID NO: 1286 - protein, 12 aa, Artificial Sequence
  Description of Artificial Sequence: Synthetic peptide
  N-term Ac
  MOD_RES (3)..(3): 3-Chloro-Phe
  MOD_RES (4)..(4): Alpha-Me R8-octenyl-alanine olefin amino acid connected by an all-carbon crosslinker comprising one double bond
  misc_feature (4)..(11): Crosslink between residues
  MOD_RES (11)..(11): Alpha-Me S5-pentenyl-alanine olefin amino acid connected by an all-carbon crosslinker comprising one double bond
  C-term NH2
LTFAAYWWQLAS

SEQ ID NO: 1287 - protein, 12 aa, Artificial Sequence
  Description of Artificial Sequence: Synthetic peptide
  N-term Ac
  MOD_RES (4)..(4): Alpha-Me R8-octenyl-alanine olefin amino acid connected by an all-carbon crosslinker comprising one double bond
  misc_feature (4)..(11): Crosslink between residues
  MOD_RES (11)..(11): Alpha-Me S5-pentenyl-alanine olefin amino acid connected by an all-carbon crosslinker comprising one double bond
  C-term NH2
LTFAAYWWQLAS

SEQ ID NO: 1288 - protein, 12 aa, Artificial Sequence
  Description of Artificial Sequence: Synthetic peptide
  N-term Ac
  MOD_RES (4)..(4): Alpha-Me R8-octenyl-alanine olefin amino acid connected by an all-carbon crosslinker comprising one double bond
  misc_feature (4)..(11): Crosslink between residues
  MOD_RES (11)..(11): Alpha-Me S5-pentenyl-alanine olefin amino acid connected by an all-carbon crosslinker comprising one double bond
  C-term NH2
LTFAHYWWQLAA

SEQ ID NO: 1289 - protein, 12 aa, Artificial Sequence
  Description of Artificial Sequence: Synthetic peptide
  N-term Ac
  MOD_RES (4)..(4): Alpha-Me R8-octenyl-alanine olefin amino acid connected by an all-carbon crosslinker comprising one double bond
  misc_feature (4)..(11): Crosslink between residues
  MOD_RES (11)..(11): Alpha-Me S5-pentenyl-alanine olefin amino acid connected by an all-carbon crosslinker comprising one double bond
  C-term NH2
LTFAAYWWQLAA

SEQ ID NO: 1290 - protein, 12 aa, Artificial Sequence
  Description of Artificial Sequence: Synthetic peptide
  N-term Ac
  MOD_RES (3)..(3): Phe-4F
  MOD_RES (4)..(4): Alpha-Me R8-octenyl-alanine olefin amino acid connected by an all-carbon crosslinker comprising one double bond
  misc_feature (4)..(11): Crosslink between residues
  MOD_RES (11)..(11): Alpha-Me S5-pentenyl-alanine olefin amino acid connected by an all-carbon crosslinker comprising one double bond
  C-term NH2
LTFAAYWAQLAS

SEQ ID NO: 1291 - protein, 12 aa, Artificial Sequence
  Description of Artificial Sequence: Synthetic peptide
  N-term Ac
  MOD_RES (3)..(3): 2-Fluoro-Phe
  MOD_RES (4)..(4): Alpha-Me R8-octenyl-alanine olefin amino acid connected by an all-carbon crosslinker comprising one double bond
  misc_feature (4)..(11): Crosslink between residues
  MOD_RES (11)..(11): Alpha-Me S5-pentenyl-alanine olefin amino acid connected by an all-carbon crosslinker comprising one double bond
  C-term NH2
LTFAAYWAQLAS

SEQ ID NO: 1292 - protein, 12 aa, Artificial Sequence
  Description of Artificial Sequence: Synthetic peptide
  N-term Ac
  MOD_RES (3)..(3): 3-fluoro-Phe
  MOD_RES (4)..(4): Alpha-Me R8-octenyl-alanine olefin amino acid connected by an all-carbon crosslinker comprising one double bond
  misc_feature (4)..(11): Crosslink between residues
  MOD_RES (11)..(11): Alpha-Me S5-pentenyl-alanine olefin amino acid connected by an all-carbon crosslinker comprising one double bond
  C-term NH2
LTFAAYWAQLAS

SEQ ID NO: 1293 - protein, 12 aa, Artificial Sequence
  Description of Artificial Sequence: Synthetic peptide
  N-term Ac
  MOD_RES (3)..(3): 3,4-difluoro Phe
  MOD_RES (4)..(4): Alpha-Me R8-octenyl-alanine olefin amino acid connected by an all-carbon crosslinker comprising one double bond
  misc_feature (4)..(11): Crosslink between residues
  MOD_RES (11)..(11): Alpha-Me S5-pentenyl-alanine olefin amino acid connected by an all-carbon crosslinker comprising one double bond
  C-term NH2
LTFAAYWAQLAS

SEQ ID NO: 1294 - protein, 12 aa, Artificial Sequence
  Description of Artificial Sequence: Synthetic peptide
  N-term Ac
  MOD_RES (3)..(3): 3,5-difluoro-Phe
  MOD_RES (4)..(4): Alpha-Me R8-octenyl-alanine olefin amino acid connected by an all-carbon crosslinker comprising one double bond
  misc_feature (4)..(11): Crosslink between residues
  MOD_RES (11)..(11): Alpha-Me S5-pentenyl-alanine olefin amino acid connected by an all-carbon crosslinker comprising one double bond
  C-term NH2
LTFAAYWAQLAS

SEQ ID NO: 1295 - protein, 10 aa, Artificial Sequence
  Description of Artificial Sequence: Synthetic peptide
  N-term Ac
  MOD_RES (1)..(1): 3-Chloro-Phe
  MOD_RES (2)..(2): Alpha-Me R8-octenyl-alanine olefin amino acid connected by an all-carbon crosslinker comprising one double bond
  misc_feature (2)..(9): Crosslink between residues
  MOD_RES (9)..(9): Alpha-Me S5-pentenyl-alanine olefin amino acid connected by an all-carbon crosslinker comprising one double bond
  C-term NH2
FAAYWEALAA

SEQ ID NO: 1296 - protein, 11 aa, Artificial Sequence
  Description of Artificial Sequence: Synthetic peptide
  N-term Ac
  MOD_RES (1)..(1): 3-Chloro-Phe
  MOD_RES (2)..(2): Alpha-Me R8-octenyl-alanine olefin amino acid connected by an all-carbon crosslinker comprising one double bond
  misc_feature (2)..(9): Crosslink between residues
  MOD_RES (9)..(9): Alpha-Me S5-pentenyl-alanine olefin amino acid connected by an all-carbon crosslinker comprising one double bond
  C-term NH2
FAAYWEALAAA

SEQ ID NO: 1297 - protein, 11 aa, Artificial Sequence
  Description of Artificial Sequence: Synthetic peptide
  N-term Ac
  MOD_RES (2)..(2): Alpha-Me R8-octenyl-alanine olefin amino acid connected by an all-carbon crosslinker comprising one double bond
  misc_feature (2)..(9): Crosslink between residues
  MOD_RES (5)..(5): 6cl-Trp
  MOD_RES (9)..(9): Alpha-Me S5-pentenyl-alanine olefin amino acid connected by an all-carbon crosslinker comprising one double bond
  C-term NH2
FAAYWEALAAA

SEQ ID NO: 1298 - protein, 9 aa, Artificial Sequence
  Description of Artificial Sequence: Synthetic peptide
  N-term Ac
  MOD_RES (2)..(2): Alpha-Me R8-octenyl-alanine olefin amino acid connected by an all-carbon crosslinker comprising one double bond
  misc_feature (2)..(9): Crosslink between residues
  MOD_RES (5)..(5): 6cl-Trp
  MOD_RES (9)..(9): Alpha-Me S5-pentenyl-alanine olefin amino acid connected by an all-carbon crosslinker comprising one double bond
  C-term NH2
FAAYWEALA

SEQ ID NO: 1299 - protein, 12 aa, Artificial Sequence
  Description of Artificial Sequence: Synthetic peptide
  N-term Ac
  MOD_RES (4)..(4): Alpha-Me R8-octenyl-alanine olefin amino acid connected by an all-carbon crosslinker comprising one double bond
  MOD_RES (11)..(11): Amino acid comprising two pentenyl-alanine olefin side chains that are not crosslinked
  C-term NH2
LTFAHYWAQLAS

SEQ ID NO: 1300 - protein, 12 aa, Artificial Sequence
  Description of Artificial Sequence: Synthetic peptide
  N-term Ac
  MOD_RES (4)..(4): Alpha-Me R8-octenyl-alanine olefin amino acid connected by an all-carbon crosslinker comprising one double bond
  misc_feature (4)..(11): Crosslink between residues
  MOD_RES (11)..(11): Alpha-Me S5-pentenyl-alanine olefin amino acid connected by an all-carbon crosslinker comprising one double bond
  C-term NHsBu
LTFAHYWAQLAS

SEQ ID NO: 1301 - protein, 12 aa, Artificial Sequence
  Description of Artificial Sequence: Synthetic peptide
  N-term Ac
  MOD_RES (4)..(4): Alpha-Me R8-octenyl-alanine olefin amino acid connected by an all-carbon crosslinker comprising one double bond
  misc_feature (4)..(11): Crosslink between residues
  MOD_RES (11)..(11): Alpha-Me S5-pentenyl-alanine olefin amino acid connected by an all-carbon crosslinker comprising one double bond
  C-term NH2
STFAAYWAQLAS

SEQ ID NO: 1302 - protein, 12 aa, Artificial Sequence
  Description of Artificial Sequence: Synthetic peptide
  N-term Ac
  MOD_RES (4)..(4): Alpha-Me R8-octenyl-alanine olefin amino acid connected by an all-carbon crosslinker comprising one double bond
  misc_feature (4)..(11): Crosslink between residues
  MOD_RES (11)..(11): Alpha-Me S5-pentenyl-alanine olefin amino acid connected by an all-carbon crosslinker comprising one double bond
  C-term NH2
LTFAAYWAELAS

SEQ ID NO: 1303 - protein, 12 aa, Artificial Sequence
  Description of Artificial Sequence: Synthetic peptide
  N-term Ac
  MOD_RES (4)..(4): Alpha-Me R8-octenyl-alanine olefin amino acid connected by an all-carbon crosslinker comprising one double bond
  misc_feature (4)..(11): Crosslink between residues
  MOD_RES (11)..(11): Alpha-Me S5-pentenyl-alanine olefin amino acid connected by an all-carbon crosslinker comprising one double bond
  C-term NH2
LTFAAYWAQLAE

SEQ ID NO: 1304 - protein, 12 aa, Artificial Sequence
  Description of Artificial Sequence: Synthetic peptide
  N-term mdPEG3
  MOD_RES (4)..(4): Alpha-Me R8-octenyl-alanine olefin amino acid connected by an all-carbon crosslinker comprising one double bond
  misc_feature (4)..(11): Crosslink between residues
  MOD_RES (11)..(11): Alpha-Me S5-pentenyl-alanine olefin amino acid connected by an all-carbon crosslinker comprising one double bond
  C-term NH2
LTFAAYWAQLAS

SEQ ID NO: 1305 - protein, 12 aa, Artificial Sequence
  Description of Artificial Sequence: Synthetic peptide
  N-term Ac
  MOD_RES (4)..(4): Alpha-Me R8-octenyl-alanine olefin amino acid connected by an all-carbon crosslinker comprising one double bond
  misc_feature (4)..(11): Crosslink between residues
  MOD_RES (10)..(10): hLeu
  MOD_RES (11)..(11): Alpha-Me S5-pentenyl-alanine olefin amino acid connected by an all-carbon crosslinker comprising one double bond
  C-term NH2
LTFAAYWAQLAS

SEQ ID NO: 1306 - protein, 12 aa, Artificial Sequence
  Description of Artificial Sequence: Synthetic peptide
  N-term Ac
  MOD_RES (4)..(4): Alpha-Me R8-octenyl-alanine olefin amino acid connected by an all-carbon crosslinker comprising one double bond
  misc_feature (4)..(11): Crosslink between residues
  MOD_RES (10)..(10): Cyclohexyl-Ala
  MOD_RES (11)..(11): Alpha-Me S5-pentenyl-alanine olefin amino acid connected by an all-carbon crosslinker comprising one double bond
  C-term NH2
LTFAAYWAQAAS

SEQ ID NO: 1307 - protein, 12 aa, Artificial Sequence
  Description of Artificial Sequence: Synthetic peptide
  N-term Ac
  MOD_RES (4)..(4): Alpha-Me R8-octenyl-alanine olefin amino acid connected by an all-carbon crosslinker comprising one double bond
  misc_feature (4)..(11): Crosslink between residues
  MOD_RES (10)..(10): Cyclohexyl-Gly
  MOD_RES (11)..(11): Alpha-Me S5-pentenyl-alanine olefin amino acid connected by an all-carbon crosslinker comprising one double bond
  C-term NH2
LTFAAYWAQGAS

SEQ ID NO: 1308 - protein, 12 aa, Artificial Sequence
  Description of Artificial Sequence: Synthetic peptide
  N-term Ac
  MOD_RES (4)..(4): Alpha-Me R8-octenyl-alanine olefin amino acid connected by an all-carbon crosslinker comprising one double bond
  misc_feature (4)..(11): Crosslink between residues
  MOD_RES (10)..(10): Cyclobutyl-Ala
  MOD_RES (11)..(11): Alpha-Me S5-pentenyl-alanine olefin amino acid connected by an all-carbon crosslinker comprising one double bond
  C-term NH2
LTFAAYWAQAAS

SEQ ID NO: 1309 - protein, 12 aa, Artificial Sequence
  Description of Artificial Sequence: Synthetic peptide
  N-term Ac
  MOD_RES (4)..(4): Alpha-Me R8-octenyl-alanine olefin amino acid connected by an all-carbon crosslinker comprising one double bond
  misc_feature (4)..(11): Crosslink between residues
  MOD_RES (11)..(11): Alpha-Me S5-pentenyl-alanine olefin amino acid connected by an all-carbon crosslinker comprising one double bond
  C-term NH2
LTFAAYWAQFAS

SEQ ID NO: 1310 - protein, 12 aa, Artificial Sequence
  Description of Artificial Sequence: Synthetic peptide
  N-term Ac
  MOD_RES (3)..(3): Phe-4F
  MOD_RES (4)..(4): Alpha-Me R8-octenyl-alanine olefin amino acid connected by an all-carbon crosslinker comprising one double bond
  misc_feature (4)..(11): Crosslink between residues
  MOD_RES (10)..(10): hLeu
  MOD_RES (11)..(11): Alpha-Me S5-pentenyl-alanine olefin amino acid connected by an all-carbon crosslinker comprising one double bond
  C-term NH2
LTFAHYWAQLAS

SEQ ID NO: 1311 - protein, 12 aa, Artificial Sequence
  Description of Artificial Sequence: Synthetic peptide
  N-term Ac
  MOD_RES (3)..(3): Phe-4F
  MOD_RES (4)..(4): Alpha-Me R8-octenyl-alanine olefin amino acid connected by an all-carbon crosslinker comprising one double bond
  misc_feature (4)..(11): Crosslink between residues
  MOD_RES (10)..(10): Cyclohexyl-Ala
  MOD_RES (11)..(11): Alpha-Me S5-pentenyl-alanine olefin amino acid connected by an all-carbon crosslinker comprising one double bond
  C-term NH2
LTFAHYWAQAAS

SEQ ID NO: 1312 - protein, 12 aa, Artificial Sequence
  Description of Artificial Sequence: Synthetic peptide
  N-term Ac
  MOD_RES (3)..(3): Phe-4F
  MOD_RES (4)..(4): Alpha-Me R8-octenyl-alanine olefin amino acid connected by an all-carbon crosslinker comprising one double bond
  misc_feature (4)..(11): Crosslink between residues
  MOD_RES (10)..(10): Cyclohexyl-Gly
  MOD_RES (11)..(11): Alpha-Me S5-pentenyl-alanine olefin amino acid connected by an all-carbon crosslinker comprising one double bond
  C-term NH2
LTFAHYWAQGAS

SEQ ID NO: 1313 - protein, 12 aa, Artificial Sequence
  Description of Artificial Sequence: Synthetic peptide
  N-term Ac
  MOD_RES (3)..(3): Phe-4F
  MOD_RES (4)..(4): Alpha-Me R8-octenyl-alanine olefin amino acid connected by an all-carbon crosslinker comprising one double bond
  misc_feature (4)..(11): Crosslink between residues
  MOD_RES (10)..(10): Cyclobutyl-Ala
  MOD_RES (11)..(11): Alpha-Me S5-pentenyl-alanine olefin amino acid connected by an all-carbon crosslinker comprising one double bond
  C-term NH2
LTFAHYWAQAAS

SEQ ID NO: 1314 - protein, 12 aa, Artificial Sequence
  Description of Artificial Sequence: Synthetic peptide
  N-term Ac
  MOD_RES (3)..(3): Phe-4F
  MOD_RES (4)..(4): Alpha-Me R8-octenyl-alanine olefin amino acid connected by an all-carbon crosslinker comprising one double bond
  misc_feature (4)..(11): Crosslink between residues
  MOD_RES (10)..(10): hLeu
  MOD_RES (11)..(11): Alpha-Me S5-pentenyl-alanine olefin amino acid connected by an all-carbon crosslinker comprising one double bond
  C-term NH2
LTFAAYWAQLAS

SEQ ID NO: 1315 - protein, 12 aa, Artificial Sequence
  Description of Artificial Sequence: Synthetic peptide
  N-term Ac
  MOD_RES (3)..(3): Phe-4F
  MOD_RES (4)..(4): Alpha-Me R8-octenyl-alanine olefin amino acid connected by an all-carbon crosslinker comprising one double bond
  misc_feature (4)..(11): Crosslink between residues
  MOD_RES (10)..(10): Cyclohexyl-Ala
  MOD_RES (11)..(11): Alpha-Me S5-pentenyl-alanine olefin amino acid connected by an all-carbon crosslinker comprising one double bond
  C-term NH2
LTFAAYWAQAAS

SEQ ID NO: 1316 - protein, 12 aa, Artificial Sequence
  Description of Artificial Sequence: Synthetic peptide
  N-term Ac
  MOD_RES (3)..(3): Phe-4F
  MOD_RES (4)..(4): Alpha-Me R8-octenyl-alanine olefin amino acid connected by an all-carbon crosslinker comprising one double bond
  misc_feature (4)..(11): Crosslink between residues
  MOD_RES (10)..(10): Cyclohexyl-Gly
  MOD_RES (11)..(11): Alpha-Me S5-pentenyl-alanine olefin amino acid connected by an all-carbon crosslinker comprising one double bond
  C-term NH2
LTFAAYWAQGAS

SEQ ID NO: 1317 - protein, 12 aa, Artificial Sequence
  Description of Artificial Sequence: Synthetic peptide
  N-term Ac
  MOD_RES (3)..(3): Phe-4F
  MOD_RES (4)..(4): Alpha-Me R8-octenyl-alanine olefin amino acid connected by an all-carbon crosslinker comprising one double bond
  misc_feature (4)..(11): Crosslink between residues
  MOD_RES (10)..(10): Cyclobutyl-Ala
  MOD_RES (11)..(11): Alpha-Me S5-pentenyl-alanine olefin amino acid connected by an all-carbon crosslinker comprising one double bond
  C-term NH2
LTFAAYWAQAAS

SEQ ID NO: 1318 - protein, 12 aa, Artificial Sequence
  Description of Artificial Sequence: Synthetic peptide
  N-term Ac
  MOD_RES (3)..(3): 3-Chloro-Phe
  MOD_RES (4)..(4): Alpha-Me R8-octenyl-alanine olefin amino acid connected by an all-carbon crosslinker comprising one double bond
  misc_feature (4)..(11): Crosslink between residues
  MOD_RES (10)..(10): hLeu
  MOD_RES (11)..(11): Alpha-Me S5-pentenyl-alanine olefin amino acid connected by an all-carbon crosslinker comprising one double bond
  C-term NH2
LTFAAYWAQLAS

SEQ ID NO: 1319 - protein, 12 aa, Artificial Sequence
  Description of Artificial Sequence: Synthetic peptide
  N-term Ac
  MOD_RES (3)..(3): 3-Chloro-Phe
  MOD_RES (4)..(4): Alpha-Me R8-octenyl-alanine olefin amino acid connected by an all-carbon crosslinker comprising one double bond
  misc_feature (4)..(11): Crosslink between residues
  MOD_RES (10)..(10): Cyclohexyl-Ala
  MOD_RES (11)..(11): Alpha-Me S5-pentenyl-alanine olefin amino acid connected by an all-carbon crosslinker comprising one double bond
  C-term NH2
LTFAAYWAQAAS

SEQ ID NO: 1320 - protein, 12 aa, Artificial Sequence
  Description of Artificial Sequence: Synthetic peptide
  N-term Ac
  MOD_RES (3)..(3): 3-Chloro-Phe
  MOD_RES (4)..(4): Alpha-Me R8-octenyl-alanine olefin amino acid connected by an all-carbon crosslinker comprising one double bond
  misc_feature (4)..(11): Crosslink between residues
  MOD_RES (10)..(10): Cyclohexyl-Gly
  MOD_RES (11)..(11): Alpha-Me S5-pentenyl-alanine olefin amino acid connected by an all-carbon crosslinker comprising one double bond
  C-term NH2
LTFAAYWAQGAS

SEQ ID NO: 1321 - protein, 12 aa, Artificial Sequence
  Description of Artificial Sequence: Synthetic peptide
  N-term Ac
  MOD_RES (3)..(3): 3-Chloro-Phe
  MOD_RES (4)..(4): Alpha-Me R8-octenyl-alanine olefin amino acid connected by an all-carbon crosslinker comprising one double bond
  misc_feature (4)..(11): Crosslink between residues
  MOD_RES (10)..(10): Cyclobutyl-Ala
  MOD_RES (11)..(11): Alpha-Me S5-pentenyl-alanine olefin amino acid connected by an all-carbon crosslinker comprising one double bond
  C-term NH2
LTFAAYWAQAAS

SEQ ID NO: 1322 - protein, 12 aa, Artificial Sequence
  Description of Artificial Sequence: Synthetic peptide
  N-term Ac
  MOD_RES (4)..(4): Alpha-Me R8-octenyl-alanine olefin amino acid connected by an all-carbon crosslinker comprising one double bond
  misc_feature (4)..(11): Crosslink between residues
  MOD_RES (10)..(10): homo-Phe
  MOD_RES (11)..(11): Alpha-Me S5-pentenyl-alanine olefin amino acid connected by an all-carbon crosslinker comprising one double bond
  C-term NH2
LTFAAYWAQFAS

SEQ ID NO: 1323 - protein, 12 aa, Artificial Sequence
  Description of Artificial Sequence: Synthetic peptide
  N-term Ac
  MOD_RES (4)..(4): Alpha-Me R8-octenyl-alanine olefin amino acid connected by an all-carbon crosslinker comprising one double bond
  misc_feature (4)..(11): Crosslink between residues
  MOD_RES (10)..(10): Phe-3CF3
  MOD_RES (11)..(11): Alpha-Me S5-pentenyl-alanine olefin amino acid connected by an all-carbon crosslinker comprising one double bond
  C-term NH2
LTFAAYWAQFAS

SEQ ID NO: 1324 - protein, 12 aa, Artificial Sequence
  Description of Artificial Sequence: Synthetic peptide
  N-term Ac
  MOD_RES (4)..(4): Alpha-Me R8-octenyl-alanine olefin amino acid connected by an all-carbon crosslinker comprising one double bond
  misc_feature (4)..(11): Crosslink between residues
  MOD_RES (10)..(10): Phe-3Me
  MOD_RES (11)..(11): Alpha-Me S5-pentenyl-alanine olefin amino acid connected by an all-carbon crosslinker comprising one double bond
  C-term NH2
LTFAAYWAQFAS

SEQ ID NO: 1325 - protein, 12 aa, Artificial Sequence
  Description of Artificial Sequence: Synthetic peptide
  N-term Ac
  MOD_RES (4)..(4): Alpha-Me R8-octenyl-alanine olefin amino acid connected by an all-carbon crosslinker comprising one double bond
  misc_feature (4)..(11): Crosslink between residues
  MOD_RES (10)..(10): 1-Naphthalanine
  MOD_RES (11)..(11): Alpha-Me S5-pentenyl-alanine olefin amino acid connected by an all-carbon crosslinker comprising one double bond
  C-term NH2
LTFAAYWAQAAS

SEQ ID NO: 1326 - protein, 12 aa, Artificial Sequence
  Description of Artificial Sequence: Synthetic peptide
  N-term Ac
  MOD_RES (4)..(4): Alpha-Me R8-octenyl-alanine olefin amino acid connected by an all-carbon crosslinker comprising one double bond
  misc_feature (4)..(11): Crosslink between residues
  MOD_RES (10)..(10): Bi-Phe
  MOD_RES (11)..(11): Alpha-Me S5-pentenyl-alanine olefin amino acid connected by an all-carbon crosslinker comprising one double bond
  C-term NH2
LTFAAYWAQFAS

SEQ ID NO: 1327 - protein, 12 aa, Artificial Sequence
  Description of Artificial Sequence: Synthetic peptide
  N-term Ac
  MOD_RES (4)..(4): Alpha-Me R8-octenyl-alanine olefin amino acid connected by an all-carbon crosslinker comprising one double bond
  misc_feature (4)..(11): Crosslink between residues
  MOD_RES (11)..(11): Alpha-Me S5-pentenyl-alanine olefin amino acid connected by an all-carbon crosslinker comprising one double bond
  C-term NH2
LTFAFYWAQLAA

SEQ ID NO: 1328 - protein, 12 aa, Artificial Sequence
  Description of Artificial Sequence: Synthetic peptide
  N-term Ac
  MOD_RES (4)..(4): Alpha-Me R8-octenyl-alanine olefin amino acid connected by an all-carbon crosslinker comprising one double bond
  misc_feature (4)..(11): Crosslink between residues
  MOD_RES (11)..(11): Alpha-Me S5-pentenyl-alanine olefin amino acid connected by an all-carbon crosslinker comprising one double bond
  C-term NHAm
LTFAHYWAQLAS

SEQ ID NO: 1329 - protein, 12 aa, Artificial Sequence
  Description of Artificial Sequence: Synthetic peptide
  N-term Ac
  MOD_RES (4)..(4): Alpha-Me R8-octenyl-alanine olefin amino acid connected by an all-carbon crosslinker comprising one double bond
  misc_feature (4)..(11): Crosslink between residues
  MOD_RES (11)..(11): Alpha-Me S5-pentenyl-alanine olefin amino acid connected by an all-carbon crosslinker comprising one double bond
  C-term NHiAm
LTFAHYWAQLAS

SEQ ID NO: 1330 - protein, 12 aa, Artificial Sequence
  Description of Artificial Sequence: Synthetic peptide
  N-term Ac
  MOD_RES (4)..(4): Alpha-Me R8-octenyl-alanine olefin amino acid connected by an all-carbon crosslinker comprising one double bond
  misc_feature (4)..(11): Crosslink between residues
  MOD_RES (11)..(11): Alpha-Me S5-pentenyl-alanine olefin amino acid connected by an all-carbon crosslinker comprising one double bond
  C-term NHnPr3Ph
LTFAHYWAQLAS

SEQ ID NO: 1331 - protein, 12 aa, Artificial Sequence
  Description of Artificial Sequence: Synthetic peptide
  N-term Ac
  MOD_RES (4)..(4): Alpha-Me R8-octenyl-alanine olefin amino acid connected by an all-carbon crosslinker comprising one double bond
  misc_feature (4)..(11): Crosslink between residues
  MOD_RES (11)..(11): Alpha-Me S5-pentenyl-alanine olefin amino acid connected by an all-carbon crosslinker comprising one double bond
  C-term NHnBu3,3Me
LTFAHYWAQLAS

SEQ ID NO: 1332 - protein, 12 aa, Artificial Sequence
  Description of Artificial Sequence: Synthetic peptide
  N-term Ac
  MOD_RES (4)..(4): Alpha-Me R8-octenyl-alanine olefin amino acid connected by an all-carbon crosslinker comprising one double bond
  misc_feature (4)..(11): Crosslink between residues
  MOD_RES (11)..(11): Alpha-Me S5-pentenyl-alanine olefin amino acid connected by an all-carbon crosslinker comprising one double bond
  C-term NHnPr
LTFAHYWAQLAS

SEQ ID NO: 1333 - protein, 12 aa, Artificial Sequence
  Description of Artificial Sequence: Synthetic peptide
  N-term Ac
  MOD_RES (4)..(4): Alpha-Me R8-octenyl-alanine olefin amino acid connected by an all-carbon crosslinker comprising one double bond
  misc_feature (4)..(11): Crosslink between residues
  MOD_RES (11)..(11): Alpha-Me S5-pentenyl-alanine olefin amino acid connected by an all-carbon crosslinker comprising one double bond
  C-term NHnEt2Ch
LTFAHYWAQLAS

SEQ ID NO: 1334 - protein, 12 aa, Artificial Sequence
  Description of Artificial Sequence: Synthetic peptide
  N-term Ac
  MOD_RES (4)..(4): Alpha-Me R8-octenyl-alanine olefin amino acid connected by an all-carbon crosslinker comprising one double bond
  misc_feature (4)..(11): Crosslink between residues
  MOD_RES (11)..(11): Alpha-Me S5-pentenyl-alanine olefin amino acid connected by an all-carbon crosslinker comprising one double bond
  C-term NHHex
LTFAHYWAQLAS

SEQ ID NO: 1335 - protein, 12 aa, Artificial Sequence
  Description of Artificial Sequence: Synthetic peptide
  N-term Ac
  MOD_RES (4)..(4): Alpha-Me R8-octenyl-alanine olefin amino acid connected by an all-carbon crosslinker comprising one double bond
  misc_feature (4)..(11): Crosslink between residues
  MOD_RES (11)..(11): Alpha-Me S5-pentenyl-alanine olefin amino acid connected by an all-carbon crosslinker comprising one double bond
  C-term NHmdPeg2
LTFAAYWAQLAS

SEQ ID NO: 1336 - protein, 12 aa, Artificial Sequence
  Description of Artificial Sequence: Synthetic peptide
  N-term Ac
  MOD_RES (4)..(4): Alpha-Me R8-octenyl-alanine olefin amino acid connected by an all-carbon crosslinker comprising one double bond
  misc_feature (4)..(11): Crosslink between residues
  MOD_RES (11)..(11): Alpha-Me S5-pentenyl-alanine olefin amino acid connected by an all-carbon crosslinker comprising one double bond
  C-term NHmdPeg2
LTFAAYWAQLAA

SEQ ID NO: 1337 - protein, 12 aa, Artificial Sequence
  Description of Artificial Sequence: Synthetic peptide
  N-term Ac
  MOD_RES (4)..(4): Alpha-Me R8-octenyl-alanine olefin amino acid connected by an all-carbon crosslinker comprising one double bond
  misc_feature (4)..(11): Crosslink between residues
  MOD_RES (11)..(11): Alpha-Me S5-pentenyl-alanine olefin amino acid connected by an all-carbon crosslinker comprising one double bond
  C-term NHmdPeg4
LTFAAYWAQLAA

SEQ ID NO: 1338 - protein, 10 aa, Artificial Sequence
  Description of Artificial Sequence: Synthetic peptide
  N-term Ac
  MOD_RES (2)..(2): Alpha-Me R8-octenyl-alanine olefin amino acid connected by an all-carbon crosslinker comprising one double bond
  misc_feature (2)..(9): Crosslink between residues
  MOD_RES (5)..(5): dl4m-Trp
  MOD_RES (9)..(9): Alpha-Me S5-pentenyl-alanine olefin amino acid connected by an all-carbon crosslinker comprising one double bond
  C-term NH2
FAAYWEALAA

SEQ ID NO: 1339 - protein, 10 aa, Artificial Sequence
  Description of Artificial Sequence: Synthetic peptide
  N-term Ac
  MOD_RES (2)..(2): Alpha-Me R8-octenyl-alanine olefin amino acid connected by an all-carbon crosslinker comprising one double bond
  misc_feature (2)..(9): Crosslink between residues
  MOD_RES (5)..(5): dl5cl-Trp
  MOD_RES (9)..(9): Alpha-Me S5-pentenyl-alanine olefin amino acid connected by an all-carbon crosslinker comprising one double bond
  C-term NH2
FAAYWEALAA

SEQ ID NO: 1340 - protein, 12 aa, Artificial Sequence
  Description of Artificial Sequence: Synthetic peptide
  N-term Ac
  MOD_RES (3)..(3): homo-Phe
  MOD_RES (4)..(4): Alpha-Me R8-octenyl-alanine olefin amino acid connected by an all-carbon crosslinker comprising one double bond
  misc_feature (4)..(11): Crosslink between residues
  MOD_RES (11)..(11): Alpha-Me S5-pentenyl-alanine olefin amino acid connected by an all-carbon crosslinker comprising one double bond
  C-term NH2
LTFAAYWAQLAS

SEQ ID NO: 1341 - protein, 12 aa, Artificial Sequence
  Description of Artificial Sequence: Synthetic peptide
  N-term Ac
  MOD_RES (3)..(3): 2-Naphthalanine
  MOD_RES (4)..(4): Alpha-Me R8-octenyl-alanine olefin amino acid connected by an all-carbon crosslinker comprising one double bond
  misc_feature (4)..(11): Crosslink between residues
  MOD_RES (11)..(11): Alpha-Me S5-pentenyl-alanine olefin amino acid connected by an all-carbon crosslinker comprising one double bond
  C-term NH2
LTAAAYWAQLAS

SEQ ID NO: 1342 - protein, 12 aa, Artificial Sequence
  Description of Artificial Sequence: Synthetic peptide
  N-term Ac
  MOD_RES (4)..(4): Alpha-Me R8-octenyl-alanine olefin amino acid connected by an all-carbon crosslinker comprising one double bond
  misc_feature (4)..(11): Crosslink between residues
  MOD_RES (11)..(11): Alpha-Me S5-pentenyl-alanine olefin amino acid connected by an all-carbon crosslinker comprising one double bond
  C-term NH2
LTAAAYWAQLAS

SEQ ID NO: 1343 - protein, 12 aa, Artificial Sequence
  Description of Artificial Sequence: Synthetic peptide
  N-term Ac
  MOD_RES (4)..(4): Alpha-Me R8-octenyl-alanine olefin amino acid connected by an all-carbon crosslinker comprising one double bond
  misc_feature (4)..(11): Crosslink between residues
  MOD_RES (11)..(11): Alpha-Me S5-pentenyl-alanine olefin amino acid connected by an all-carbon crosslinker comprising one double bond
  C-term NH2
LTFAAYWVQLAS

SEQ ID NO: 1344 - protein, 12 aa, Artificial Sequence
  Description of Artificial Sequence: Synthetic peptide
  N-term Ac
  MOD_RES (4)..(4): Alpha-Me R8-octenyl-alanine olefin amino acid connected by an all-carbon crosslinker comprising one double bond
  misc_feature (4)..(11): Crosslink between residues
  MOD_RES (11)..(11): Alpha-Me S5-pentenyl-alanine olefin amino acid connected by an all-carbon crosslinker comprising one double bond
  C-term NH2
LTFAHYWAALAA

SEQ ID NO: 1345 - protein, 12 aa, Artificial Sequence
  Description of Artificial Sequence: Synthetic peptide
  N-term Ac
  MOD_RES (4)..(4): Alpha-Me R8-octenyl-alanine olefin amino acid connected by an all-carbon crosslinker comprising one double bond
  misc_feature (4)..(11): Crosslink between residues
  MOD_RES (11)..(11): Alpha-Me S5-pentenyl-alanine olefin amino acid connected by an all-carbon crosslinker comprising one double bond
  C-term NH2
LTFAVYWAQLAA

SEQ ID NO: 1346 - protein, 12 aa, Artificial Sequence
  Description of Artificial Sequence: Synthetic peptide
  N-term Ac
  MOD_RES (4)..(4): Alpha-Me R8-octenyl-alanine olefin amino acid connected by an all-carbon crosslinker comprising one double bond
  misc_feature (4)..(11): Crosslink between residues
  MOD_RES (11)..(11): Alpha-Me S5-pentenyl-alanine olefin amino acid connected by an all-carbon crosslinker comprising one double bond
  C-term NH2
LTFAIYWAQLAS

SEQ ID NO: 1347 - protein, 12 aa, Artificial Sequence
  Description of Artificial Sequence: Synthetic peptide
  N-term Ac
  MOD_RES (4)..(4): Alpha-Me R8-octenyl-alanine olefin amino acid connected by an all-carbon crosslinker comprising one double bond
  misc_feature (4)..(11): Crosslink between residues
  MOD_RES (11)..(11): Alpha-Me S5-pentenyl-alanine olefin amino acid connected by an all-carbon crosslinker comprising one double bond
  C-term NH2
FTFAVYWSQLAS

SEQ ID NO: 1348 - protein, 12 aa, Artificial Sequence
  Description of Artificial Sequence: Synthetic peptide
  N-term Ac
  MOD_RES (4)..(4): Alpha-Me R8-octenyl-alanine olefin amino acid connected by an all-carbon crosslinker comprising one double bond
  misc_feature (4)..(11): Crosslink between residues
  MOD_RES (11)..(11): Alpha-Me S5-pentenyl-alanine olefin amino acid connected by an all-carbon crosslinker comprising one double bond
  C-term NH2
ITFAFYWAQLAS

SEQ ID NO: 1349 - protein, 12 aa, Artificial Sequence
  Description of Artificial Sequence: Synthetic peptide
  N-term Ac
  MOD_RES (1)..(1): 2-Naphthalanine
  MOD_RES (4)..(4): Alpha-Me R8-octenyl-alanine olefin amino acid connected by an all-carbon crosslinker comprising one double bond
  misc_feature (4)..(11): Crosslink between residues
  MOD_RES (11)..(11): Alpha-Me S5-pentenyl-alanine olefin amino acid connected by an all-carbon crosslinker comprising one double bond
  C-term NH2
ATFAVYWSQLAS

SEQ ID NO: 1350 - protein, 12 aa, Artificial Sequence
  Description of Artificial Sequence: Synthetic peptide
  N-term Ac
  MOD_RES (4)..(4): Alpha-Me R8-octenyl-alanine olefin amino acid connected by an all-carbon crosslinker comprising one double bond
  misc_feature (4)..(11): Crosslink between residues
  MOD_RES (11)..(11): Alpha-Me S5-pentenyl-alanine olefin amino acid connected by an all-carbon crosslinker comprising one double bond
  C-term NH2
ITFALYWSQLAS

SEQ ID NO: 1351 - protein, 12 aa, Artificial Sequence
  Description of Artificial Sequence: Synthetic peptide
  N-term Ac
  MOD_RES (4)..(4): Alpha-Me R8-octenyl-alanine olefin amino acid connected by an all-carbon crosslinker comprising one double bond
  misc_feature (4)..(11): Crosslink between residues
  MOD_RES (11)..(11): Alpha-Me S5-pentenyl-alanine olefin amino acid connected by an all-carbon crosslinker comprising one double bond
  C-term NH2
FTFAFYWAQLAS

SEQ ID NO: 1352 - protein, 12 aa, Artificial Sequence
  Description of Artificial Sequence: Synthetic peptide
  N-term Ac
  MOD_RES (4)..(4): Alpha-Me R8-octenyl-alanine olefin amino acid connected by an all-carbon crosslinker comprising one double bond
  misc_feature (4)..(11): Crosslink between residues
  MOD_RES (11)..(11): Alpha-Me S5-pentenyl-alanine olefin amino acid connected by an all-carbon crosslinker comprising one double bond
  C-term NH2
WTFAVYWAQLAS

SEQ ID NO: 1353 - protein, 12 aa, Artificial Sequence
  Description of Artificial Sequence: Synthetic peptide
  N-term Ac
  MOD_RES (4)..(4): Alpha-Me R8-octenyl-alanine olefin amino acid connected by an all-carbon crosslinker comprising one double bond
  misc_feature (4)..(11): Crosslink between residues
  MOD_RES (11)..(11): Alpha-Me S5-pentenyl-alanine olefin amino acid connected by an all-carbon crosslinker comprising one double bond
  C-term NH2
WTFAWYWAQLAS

SEQ ID NO: 1354 - protein, 12 aa, Artificial Sequence
  Description of Artificial Sequence: Synthetic peptide
  N-term Ac
  MOD_RES (4)..(4): Alpha-Me R8-octenyl-alanine olefin amino acid connected by an all-carbon crosslinker comprising one double bond
  misc_feature (4)..(11): Crosslink between residues
  MOD_RES (11)..(11): Alpha-Me S5-pentenyl-alanine olefin amino acid connected by an all-carbon crosslinker comprising one double bond
  C-term NH2
VTFAAYWSQLAS

SEQ ID NO: 1355 - protein, 12 aa, Artificial Sequence
  Description of Artificial Sequence: Synthetic peptide
  N-term Ac
  MOD_RES (4)..(4): Alpha-Me R8-octenyl-alanine olefin amino acid connected by an all-carbon crosslinker comprising one double bond
  misc_feature (4)..(11): Crosslink between residues
  MOD_RES (11)..(11): Alpha-Me S5-pentenyl-alanine olefin amino acid connected by an all-carbon crosslinker comprising one double bond
  C-term NH2
WTFAFYWSQLAS

SEQ ID NO: 1356 - protein, 12 aa, Artificial Sequence
  Description of Artificial Sequence: Synthetic peptide
  N-term Ac
  MOD_RES (4)..(4): Alpha-Me R8-octenyl-alanine olefin amino acid connected by an all-carbon crosslinker comprising one double bond
  misc_feature (4)..(11): Crosslink between residues
  MOD_RES (11)..(11): Alpha-Me S5-pentenyl-alanine olefin amino acid connected by an all-carbon crosslinker comprising one double bond
  C-term NH2
FTFAIYWAQLAS

SEQ ID NO: 1357 - protein, 12 aa, Artificial Sequence
  Description of Artificial Sequence: Synthetic peptide
  N-term Ac
  MOD_RES (4)..(4): Alpha-Me R8-octenyl-alanine olefin amino acid connected by an all-carbon crosslinker comprising one double bond
  misc_feature (4)..(11): Crosslink between residues
  MOD_RES (11)..(11): Alpha-Me S5-pentenyl-alanine olefin amino acid connected by an all-carbon crosslinker comprising one double bond
  C-term NH2
WTFAVYWSQLAS

SEQ ID NO: 1358 - protein, 12 aa, Artificial Sequence
  Description of Artificial Sequence: Synthetic peptide
  N-term Ac
  MOD_RES (4)..(4): Alpha-Me R8-octenyl-alanine olefin amino acid connected by an all-carbon crosslinker comprising one double bond
  misc_feature (4)..(11): Crosslink between residues
  MOD_RES (11)..(11): Alpha-Me S5-pentenyl-alanine olefin amino acid connected by an all-carbon crosslinker comprising one double bond
  C-term NH2
FTFALYWSQLAS

SEQ ID NO: 1359 - protein, 12 aa, Artificial Sequence
  Description of Artificial Sequence: Synthetic peptide
  N-term Ac
  MOD_RES (4)..(4): Alpha-Me R8-octenyl-alanine olefin amino acid connected by an all-carbon crosslinker comprising one double bond
  misc_feature (4)..(11): Crosslink between residues
  MOD_RES (11)..(11): Alpha-Me S5-pentenyl-alanine olefin amino acid connected by an all-carbon crosslinker comprising one double bond
  C-term NH2
YTFAFYWSQLAS

SEQ ID NO: 1360 - protein, 12 aa, Artificial Sequence
  Description of Artificial Sequence: Synthetic peptide
  N-term Ac
  MOD_RES (4)..(4): Alpha-Me R8-octenyl-alanine olefin amino acid connected by an all-carbon crosslinker comprising one double bond
  misc_feature (4)..(11): Crosslink between residues
  MOD_RES (7)..(7): 6cl-Trp
  MOD_RES (11)..(11): Alpha-Me S5-pentenyl-alanine olefin amino acid connected by an all-carbon crosslinker comprising one double bond
  C-term NH2
LTFAAYWEALAA

SEQ ID NO: 1361 - protein, 12 aa, Artificial Sequence
  Description of Artificial Sequence: Synthetic peptide
  N-term Ac
  MOD_RES (4)..(4): Alpha-Me R8-octenyl-alanine olefin amino acid connected by an all-carbon crosslinker comprising one double bond
  misc_feature (4)..(11): Crosslink between residues
  MOD_RES (7)..(7): 6cl-Trp
  MOD_RES (11)..(11): Alpha-Me S5-pentenyl-alanine olefin amino acid connected by an all-carbon crosslinker comprising one double bond
  C-term NH2
LTFAAYWSQLAS

SEQ ID NO: 1362 - protein, 10 aa, Artificial Sequence
  Description of Artificial Sequence: Synthetic peptide
  N-term Ac
  MOD_RES (2)..(2): Alpha-Me R8-octenyl-alanine olefin amino acid connected by an all-carbon crosslinker comprising one double bond
  misc_feature (2)..(9): Crosslink between residues
  MOD_RES (5)..(5): 6cl-Trp
  MOD_RES (9)..(9): Alpha-Me S5-pentenyl-alanine olefin amino acid connected by an all-carbon crosslinker comprising one double bond
  C-term NH2
FAAYWSALAA

SEQ ID NO: 1363 - protein, 11 aa, Artificial Sequence
  Description of Artificial Sequence: Synthetic peptide
  N-term Ac
  MOD_RES (2)..(2): Alpha-Me R8-octenyl-alanine olefin amino acid connected by an all-carbon crosslinker comprising one double bond
  misc_feature (2)..(9): Crosslink between residues
  MOD_RES (5)..(5): 6cl-Trp
  MOD_RES (9)..(9): Alpha-Me S5-pentenyl-alanine olefin amino acid connected by an all-carbon crosslinker comprising one double bond
  C-term NH2
FAAYWQALAAA

SEQ ID NO: 1364 - protein, 12 aa, Artificial Sequence
  Description of Artificial Sequence: Synthetic peptide
  N-term Ac
  MOD_RES (4)..(4): Alpha-Me R8-octenyl-alanine olefin amino acid connected by an all-carbon crosslinker comprising one double bond
  misc_feature (4)..(11): Crosslink between residues
  MOD_RES (11)..(11): Alpha-Me S5-pentenyl-alanine olefin amino acid connected by an all-carbon crosslinker comprising one double bond
  C-term NH2
LHFAAYWAQLAS

SEQ ID NO: 1365 - protein, 12 aa, Artificial Sequence
  Description of Artificial Sequence: Synthetic peptide
  N-term Ac
  MOD_RES (4)..(4): Alpha-Me R8-octenyl-alanine olefin amino acid connected by an all-carbon crosslinker comprising one double bond
  misc_feature (4)..(11): Crosslink between residues
  MOD_RES (11)..(11): Alpha-Me S5-pentenyl-alanine olefin amino acid connected by an all-carbon crosslinker comprising one double bond
  C-term NH2
LTFAAYWAQLAS

SEQ ID NO: 1366 - protein, 12 aa, Artificial Sequence
  Description of Artificial Sequence: Synthetic peptide
  N-term Ac
  MOD_RES (4)..(4): Alpha-Me R8-octenyl-alanine olefin amino acid connected by an all-carbon crosslinker comprising one double bond
  misc_feature (4)..(11): Crosslink between residues
  MOD_RES (11)..(11): Alpha-Me S5-pentenyl-alanine olefin amino acid connected by an all-carbon crosslinker comprising one double bond
  C-term NH2
LTFAAHWAQLAS

SEQ ID NO: 1367 - protein, 12 aa, Artificial Sequence
  Description of Artificial Sequence: Synthetic peptide
  N-term Ac
  MOD_RES (4)..(4): Alpha-Me R8-octenyl-alanine olefin amino acid connected by an all-carbon crosslinker comprising one double bond
  misc_feature (4)..(11): Crosslink between residues
  MOD_RES (11)..(11): Alpha-Me S5-pentenyl-alanine olefin amino acid connected by an all-carbon crosslinker comprising one double bond
  C-term NH2
LTFAAYWAHLAS

SEQ ID NO: 1368 - protein, 12 aa, Artificial Sequence
  Description of Artificial Sequence: Synthetic peptide
  N-term Ac
  MOD_RES (4)..(4): Alpha-Me R8-octenyl-alanine olefin amino acid connected by an all-carbon crosslinker comprising one double bond
  misc_feature (4)..(11): Crosslink between residues
  MOD_RES (11)..(11): Alpha-Me S5-pentenyl-alanine olefin amino acid connected by an all-carbon crosslinker comprising one double bond
  C-term NH2
LTFAAYWAQLAH

SEQ ID NO: 1369 - protein, 13 aa, Artificial Sequence
  Description of Artificial Sequence: Synthetic peptide
  MOD_RES (5)..(5): Alpha-Me R8-octenyl-alanine olefin amino acid connected by an all-carbon crosslinker comprising one double bond
  misc_feature (5)..(12): Crosslink between residues
  MOD_RES (12)..(12): Alpha-Me S5-pentenyl-alanine olefin amino acid connected by an all-carbon crosslinker comprising one double bond
  C-term NH2
HLTFAAYWAQLAA

SEQ ID NO: 1370 - protein, 12 aa, Artificial Sequence
  Description of Artificial Sequence: Synthetic peptide
  N-term Ac
  MOD_RES (4)..(4): Alpha-Me R8-octenyl-alanine olefin amino acid connected by an all-carbon crosslinker comprising one double bond
  misc_feature (4)..(11): Crosslink between residues
  MOD_RES (11)..(11): Alpha-Me S5-pentenyl-alanine olefin amino acid connected by an all-carbon crosslinker comprising one double bond
  C-term NH2
HHFAAYWAQLAS

SEQ ID NO: 1371 - protein, 14 aa, Artificial Sequence
  Description of Artificial Sequence: Synthetic peptide
  N-term Ac
  MOD_RES (1)..(1): D-amino acid
  MOD_RES (2)..(2): 2-aminoisobutyric acid
  MOD_RES (6)..(6): Alpha-Me R8-octenyl-alanine olefin amino acid connected by an all-carbon crosslinker comprising one double bond
  misc_feature (6)..(13): Crosslink between residues
  MOD_RES (13)..(13): Alpha-Me S5-pentenyl-alanine olefin amino acid connected by an all-carbon crosslinker comprising one double bond
  C-term NH2
AXWTFAVYWSQLAS

SEQ ID NO: 1372 - protein, 13 aa, Artificial Sequence
  Description of Artificial Sequence: Synthetic peptide
  N-term Ac
  MOD_RES (1)..(1): 2-aminoisobutyric acid
  MOD_RES (5)..(5): Alpha-Me R8-octenyl-alanine olefin amino acid connected by an all-carbon crosslinker comprising one double bond
  misc_feature (5)..(12): Crosslink between residues
  MOD_RES (12)..(12): Alpha-Me S5-pentenyl-alanine olefin amino acid connected by an all-carbon crosslinker comprising one double bond
  C-term NH2
XWTFAHYWAQLAS

SEQ ID NO: 1373 - protein, 14 aa, Artificial Sequence
  Description of Artificial Sequence: Synthetic peptide
  N-term Ac
  MOD_RES (1)..(1): 2-aminoisobutyric acid
  MOD_RES (6)..(6): Alpha-Me R8-octenyl-alanine olefin amino acid connected by an all-carbon crosslinker comprising one double bond
  misc_feature (6)..(13): Crosslink between residues
  MOD_RES (13)..(13): Alpha-Me S5-pentenyl-alanine olefin amino acid connected by an all-carbon crosslinker comprising one double bond
  C-term NH2
XAWTFAHYWAQLAS

SEQ ID NO: 1374 - protein, 13 aa, Artificial Sequence
  Description of Artificial Sequence: Synthetic peptide
  N-term Ac
  MOD_RES (1)..(1): D-amino acid
  MOD_RES (5)..(5): Alpha-Me R8-octenyl-alanine olefin amino acid connected by an all-carbon crosslinker comprising one double bond
  misc_feature (5)..(12): Crosslink between residues
  MOD_RES (12)..(12): Alpha-Me S5-pentenyl-alanine olefin amino acid connected by an all-carbon crosslinker comprising one double bond
  C-term NH2
FWTFAHYWAQLAS

SEQ ID NO: 1375 - protein, 14 aa, Artificial Sequence
  Description of Artificial Sequence: Synthetic peptide
  N-term Ac
  MOD_RES (1)..(1): 2-aminoisobutyric acid
  MOD_RES (6)..(6): Alpha-Me R8-octenyl-alanine olefin amino acid connected by an all-carbon crosslinker comprising one double bond
  misc_feature (6)..(13): Crosslink between residues
  MOD_RES (13)..(13): Alpha-Me S5-pentenyl-alanine olefin amino acid connected by an all-carbon crosslinker comprising one double bond
  C-term NH2
XWWTFAHYWAQLAS

SEQ ID NO: 1376 - protein, 12 aa, Artificial Sequence
  Description of Artificial Sequence: Synthetic peptide
  N-term Ac
  MOD_RES (4)..(4): Alpha-Me R8-octenyl-alanine olefin amino acid connected by an all-carbon crosslinker comprising one double bond
  misc_feature (4)..(11): Crosslink between residues
  MOD_RES (11)..(11): Alpha-Me S5-pentenyl-alanine olefin amino acid connected by an all-carbon crosslinker comprising one double bond
  C-term NH2
WTFALYWSQLAS

SEQ ID NO: 1377 - protein, 12 aa, Artificial Sequence
  Description of Artificial Sequence: Synthetic peptide
  N-term Ac
  MOD_RES (4)..(4): Alpha-Me R8-octenyl-alanine olefin amino acid connected by an all-carbon crosslinker comprising one double bond
  misc_feature (4)..(11): Crosslink between residues
  MOD_RES (5)..(5): Norleucine
  MOD_RES (11)..(11): Alpha-Me S5-pentenyl-alanine olefin amino acid connected by an all-carbon crosslinker comprising one double bond
  C-term NH2
WTFALYWSQLAS

SEQ ID NO: 1378 - protein, 12 aa, Artificial Sequence
  Description of Artificial Sequence: Synthetic peptide
  N-term Ac
  MOD_RES (4)..(4): Alpha-Me R8-octenyl-alanine olefin amino acid connected by an all-carbon crosslinker comprising one double bond
  misc_feature (4)..(11): Crosslink between residues
  MOD_RES (11)..(11): Alpha-Me S5-pentenyl-alanine olefin amino acid connected by an all-carbon crosslinker comprising one double bond
  MOD_RES (12)..(12): D-amino acid
  C-term NH2
LTFAAYWSQLAA

SEQ ID NO: 1379 - protein, 12 aa, Artificial Sequence
  Description of Artificial Sequence: Synthetic peptide
  N-term Ac
  MOD_RES (4)..(4): Alpha-Me R8-octenyl-alanine olefin amino acid connected by an all-carbon crosslinker comprising one double bond
  misc_feature (4)..(11): Crosslink between residues
  MOD_RES (11)..(11): Alpha-Me S5-pentenyl-alanine olefin amino acid connected by an all-carbon crosslinker comprising one double bond
  C-term NH2
LTFAEYWARLAA

SEQ ID NO: 1380 - protein, 12 aa, Artificial Sequence
  Description of Artificial Sequence: Synthetic peptide
  N-term Ac
  MOD_RES (4)..(4): Alpha-Me R8-octenyl-alanine olefin amino acid connected by an all-carbon crosslinker comprising one double bond
  misc_feature (4)..(11): Crosslink between residues
  MOD_RES (11)..(11): Alpha-Me S5-pentenyl-alanine olefin amino acid connected by an all-carbon crosslinker comprising one double bond
  C-term NH2
LTFAEYWAHLAA

SEQ ID NO: 1381 - protein, 12 aa, Artificial Sequence
  Description of Artificial Sequence: Synthetic peptide
  N-term Ac
  MOD_RES (1)..(1): D-amino acid
  MOD_RES (4)..(4): Alpha-Me R8-octenyl-alanine olefin amino acid connected by an all-carbon crosslinker comprising one double bond
  misc_feature (4)..(11): Crosslink between residues
  MOD_RES (11)..(11): Alpha-Me S5-pentenyl-alanine olefin amino acid connected by an all-carbon crosslinker comprising one double bond
  C-term NH2
ATFAAYWAQLAS

SEQ ID NO: 1382 - protein, 12 aa, Artificial Sequence
  Description of Artificial Sequence: Synthetic peptide
  N-term Ac
  MOD_RES (1)..(1): 2-aminoisobutyric acid
  MOD_RES (4)..(4): Alpha-Me R8-octenyl-alanine olefin amino acid connected by an all-carbon crosslinker comprising one double bond
  misc_feature (4)..(11): Crosslink between residues
  MOD_RES (11)..(11): Alpha-Me S5-pentenyl-alanine olefin amino acid connected by an all-carbon crosslinker comprising one double bond
  C-term NH2
XTFAAYWAQLAS

SEQ ID NO: 1383 - protein, 12 aa, Artificial Sequence
  Description of Artificial Sequence: Synthetic peptide
  N-term Ac
  MOD_RES (1)..(1): Alpha-Me-Phe
  MOD_RES (4)..(4): Alpha-Me R8-octenyl-alanine olefin amino acid connected by an all-carbon crosslinker comprising one double bond
  misc_feature (4)..(11): Crosslink between residues
  MOD_RES (11)..(11): Alpha-Me S5-pentenyl-alanine olefin amino acid connected by an all-carbon crosslinker comprising one double bond
  C-term NH2
FTFAAYWAQLAS

SEQ ID NO: 1384 - protein, 12 aa, Artificial Sequence
  Description of Artificial Sequence: Synthetic peptide
  N-term Ac
  MOD_RES (1)..(1): Alpha-Me-Trp
  MOD_RES (4)..(4): Alpha-Me R8-octenyl-alanine olefin amino acid connected by an all-carbon crosslinker comprising one double bond
  misc_feature (4)..(11): Crosslink between residues
  MOD_RES (11)..(11): Alpha-Me S5-pentenyl-alanine olefin amino acid connected by an all-carbon crosslinker comprising one double bond
  C-term NH2
WTFAAYWAQLAS

SEQ ID NO: 1385 - protein, 12 aa, Artificial Sequence
  Description of Artificial Sequence: Synthetic peptide
  N-term Ac
  MOD_RES (1)..(1): N-methyl-Leu
  MOD_RES (4)..(4): Alpha-Me R8-octenyl-alanine olefin amino acid connected by an all-carbon crosslinker comprising one double bond
  misc_feature (4)..(11): Crosslink between residues
  MOD_RES (11)..(11): Alpha-Me S5-pentenyl-alanine olefin amino acid connected by an all-carbon crosslinker comprising one double bond
  C-term NH2
LTFAAYWAQLAS

SEQ ID NO: 1386 - protein, 12 aa, Artificial Sequence
  Description of Artificial Sequence: Synthetic peptide
  N-term Ac
  MOD_RES (2)..(2): N-methyl-Thr
  MOD_RES (4)..(4): Alpha-Me R8-octenyl-alanine olefin amino acid connected by an all-carbon crosslinker comprising one double bond
  misc_feature (4)..(11): Crosslink between residues
  MOD_RES (11)..(11): Alpha-Me S5-pentenyl-alanine olefin amino acid connected by an all-carbon crosslinker comprising one double bond
  C-term NH2
LTFAAYWAQLAS

SEQ ID NO: 1387 - protein, 12 aa, Artificial Sequence
  Description of Artificial Sequence: Synthetic peptide
  N-term Ac
  MOD_RES (2)..(2): Sarcosine
  MOD_RES (4)..(4): Alpha-Me R8-octenyl-alanine olefin amino acid connected by an all-carbon crosslinker comprising one double bond
  misc_feature (4)..(11): Crosslink between residues
  MOD_RES (11)..(11): Alpha-Me S5-pentenyl-alanine olefin amino acid connected by an all-carbon crosslinker comprising one double bond
  C-term NH2
LXFAAYWAQLAS

SEQ ID NO: 1388 - protein, 12 aa, Artificial Sequence
  Description of Artificial Sequence: Synthetic peptide
  N-term Ac
  MOD_RES (4)..(4): Alpha-Me R8-octenyl-alanine olefin amino acid connected by an all-carbon crosslinker comprising one double bond
  misc_feature (4)..(11): Crosslink between residues
  MOD_RES (11)..(11): Alpha-Me S5-pentenyl-alanine olefin amino acid connected by an all-carbon crosslinker comprising one double bond
  C-term NH2
LGFAAYWAQLAS

SEQ ID NO: 1389 - protein, 12 aa, Artificial Sequence
  Description of Artificial Sequence: Synthetic peptide
  N-term Ac
  MOD_RES (3)..(3): N-methyl-Phe
  MOD_RES (4)..(4): Alpha-Me R8-octenyl-alanine olefin amino acid connected by an all-carbon crosslinker comprising one double bond
  misc_feature (4)..(11): Crosslink between residues
  MOD_RES (11)..(11): Alpha-Me S5-pentenyl-alanine olefin amino acid connected by an all-carbon crosslinker comprising one double bond
  C-term NH2
LTFAAYWAQLAS

SEQ ID NO: 1390 - protein, 11 aa, Artificial Sequence
  Description of Artificial Sequence: Synthetic peptide
  N-term Ac
  MOD_RES (3)..(3): Alpha-Me R8-octenyl-alanine olefin amino acid connected by an all-carbon crosslinker comprising one double bond
  misc_feature (3)..(10): Crosslink between residues
  MOD_RES (10)..(10): Alpha-Me S5-pentenyl-alanine olefin amino acid connected by an all-carbon crosslinker comprising one double bond
  C-term NH2
TFAAYWAQLAS

SEQ ID NO: 1391 - protein, 12 aa, Artificial Sequence
  Description of Artificial Sequence: Synthetic peptide
  N-term Ac
  MOD_RES (4)..(4): Alpha-Me R8-octenyl-alanine olefin amino acid connected by an all-carbon crosslinker comprising one double bond
  misc_feature (4)..(11): Crosslink between residues
  MOD_RES (11)..(11): Alpha-Me S5-pentenyl-alanine olefin amino acid connected by an all-carbon crosslinker comprising one double bond
  C-term NH2
ETFAAYWAQLAA

SEQ ID NO: 1392 - protein, 12 aa, Artificial Sequence
  Description of Artificial Sequence: Synthetic peptide
  N-term Ac
  MOD_RES (4)..(4): Alpha-Me R8-octenyl-alanine olefin amino acid connected by an all-carbon crosslinker comprising one double bond
  misc_feature (4)..(11): Crosslink between residues
  MOD_RES (11)..(11): Alpha-Me S5-pentenyl-alanine olefin amino acid connected by an all-carbon crosslinker comprising one double bond
  C-term NH2
LTFAEYWAQLAA

SEQ ID NO: 1393 - protein, 12 aa, Artificial Sequence
  Description of Artificial Sequence: Synthetic peptide
  N-term Ac
  MOD_RES (3)..(3): 2-Naphthalanine
  MOD_RES (4)..(4): Alpha-Me R8-octenyl-alanine olefin amino acid connected by an all-carbon crosslinker comprising one double bond
  misc_feature (4)..(11): Crosslink between residues
  MOD_RES (11)..(11): Alpha-Me S5-pentenyl-alanine olefin amino acid connected by an all-carbon crosslinker comprising one double bond
  C-term NH2
LTAAAYWSQLAS

SEQ ID NO: 1394 - protein, 12 aa, Artificial Sequence
  Description of Artificial Sequence: Synthetic peptide
  N-term Ac
  MOD_RES (4)..(4): Alpha-Me R8-octenyl-alanine olefin amino acid connected by an all-carbon crosslinker comprising one double bond
  misc_feature (4)..(11): Crosslink between residues
  MOD_RES (11)..(11): Alpha-Me S5-pentenyl-alanine olefin amino acid connected by an all-carbon crosslinker comprising one double bond
  C-term NH2
LTFAAYWAALAS

SEQ ID NO: 1395 - protein, 12 aa, Artificial Sequence
  Description of Artificial Sequence: Synthetic peptide
  N-term Ac
  MOD_RES (4)..(4): Alpha-Me R8-octenyl-alanine olefin amino acid connected by an all-carbon crosslinker comprising one double bond
  misc_feature (4)..(11): Crosslink between residues
  MOD_RES (10)..(10): homo-cyclohexyl-Ala
  MOD_RES (11)..(11): Alpha-Me S5-pentenyl-alanine olefin amino acid connected by an all-carbon crosslinker comprising one double bond
  C-term NH2
LTFAAYWAQAAS

SEQ ID NO: 1396 - protein, 12 aa, Artificial Sequence
  Description of Artificial Sequence: Synthetic peptide
  N-term Ac
  MOD_RES (4)..(4): Alpha-Me R8-octenyl-alanine olefin amino acid connected by an all-carbon crosslinker comprising one double bond
  misc_feature (4)..(11): Crosslink between residues
  MOD_RES (10)..(10): Cyclohexyl-Gly
  MOD_RES (11)..(11): Alpha-Me S5-pentenyl-alanine olefin amino acid connected by an all-carbon crosslinker comprising one double bond
  C-term NH2
LTFAAYWAQGAS

SEQ ID NO: 1397 - protein, 12 aa, Artificial Sequence
  Description of Artificial Sequence: Synthetic peptide
  N-term Ac
  MOD_RES (4)..(4): Alpha-Me R8-octenyl-alanine olefin amino acid connected by an all-carbon crosslinker comprising one double bond
  misc_feature (4)..(11): Crosslink between residues
  MOD_RES (10)..(10): Cyclobutyl-Ala
  MOD_RES (11)..(11): Alpha-Me S5-pentenyl-alanine olefin amino acid connected by an all-carbon crosslinker comprising one double bond
  C-term NH2
LTFAAYWAQAAS

SEQ ID NO: 1398 - protein, 12 aa, Artificial Sequence
  Description of Artificial Sequence: Synthetic peptide
  N-term Ac
  MOD_RES (4)..(4): Alpha-Me R8-octenyl-alanine olefin amino acid connected by an all-carbon crosslinker comprising one double bond
  misc_feature (4)..(11): Crosslink between residues
  MOD_RES (10)..(10): Phe-3CF3
  MOD_RES (11)..(11): Alpha-Me S5-pentenyl-alanine olefin amino acid connected by an all-carbon crosslinker comprising one double bond
  C-term NH2
LTFAAYWAQFAS

SEQ ID NO: 1399 - protein, 12 aa, Artificial Sequence
  Description of Artificial Sequence: Synthetic peptide
  N-term Ac
  MOD_RES (4)..(4): Alpha-Me R8-octenyl-alanine olefin amino acid connected by an all-carbon crosslinker comprising one double bond
  misc_feature (4)..(11): Crosslink between residues
  MOD_RES (10)..(10): 1-Naphthalanine
  MOD_RES (11)..(11): Alpha-Me S5-pentenyl-alanine olefin amino acid connected by an all-carbon crosslinker comprising one double bond
  C-term NH2
LTFAAYWAQAAS

SEQ ID NO: 1400 - protein, 12 aa, Artificial Sequence
  Description of Artificial Sequence: Synthetic peptide
  N-term Ac
  MOD_RES (4)..(4): Alpha-Me R8-octenyl-alanine olefin amino acid connected by an all-carbon crosslinker comprising one double bond
  misc_feature (4)..(11): Crosslink between residues
  MOD_RES (10)..(10): Bi-Phe
  MOD_RES (11)..(11): Alpha-Me S5-pentenyl-alanine olefin amino acid connected by an all-carbon crosslinker comprising one double bond
  C-term NH2
LTFAAYWAQFAS

SEQ ID NO: 1401 - protein, 12 aa, Artificial Sequence
  Description of Artificial Sequence: Synthetic peptide
  N-term Ac
  MOD_RES (3)..(3): 2-Naphthalanine
  MOD_RES (4)..(4): Alpha-Me R8-octenyl-alanine olefin amino acid connected by an all-carbon crosslinker comprising one double bond
  misc_feature (4)..(11): Crosslink between residues
  MOD_RES (11)..(11): Alpha-Me S5-pentenyl-alanine olefin amino acid connected by an all-carbon crosslinker comprising one double bond
  C-term NH2
LTAAAYWAQLAS

SEQ ID NO: 1402 - protein, 12 aa, Artificial Sequence
  Description of Artificial Sequence: Synthetic peptide
  N-term Ac
  MOD_RES (4)..(4): Alpha-Me R8-octenyl-alanine olefin amino acid connected by an all-carbon crosslinker comprising one double bond
  misc_feature (4)..(11): Crosslink between residues
  MOD_RES (11)..(11): Alpha-Me S5-pentenyl-alanine olefin amino acid connected by an all-carbon crosslinker comprising one double bond
  C-term NH2
LTFAAYWVQLAS

SEQ ID NO: 1403 - protein, 12 aa, Artificial Sequence
  Description of Artificial Sequence: Synthetic peptide
  N-term Ac
  MOD_RES (4)..(4): Alpha-Me R8-octenyl-alanine olefin amino acid connected by an all-carbon crosslinker comprising one double bond
  misc_feature (4)..(11): Crosslink between residues
  MOD_RES (11)..(11): Alpha-Me S5-pentenyl-alanine olefin amino acid connected by an all-carbon crosslinker comprising one double bond
  C-term NH2
LTFAAWWAQLAS

SEQ ID NO: 1404 - protein, 12 aa, Artificial Sequence
  Description of Artificial Sequence: Synthetic peptide
  N-term Ac
  MOD_RES (4)..(4): Alpha-Me R8-octenyl-alanine olefin amino acid connected by an all-carbon crosslinker comprising one double bond
  misc_feature (4)..(11): Crosslink between residues
  MOD_RES (11)..(11): Alpha-Me S5-pentenyl-alanine olefin amino acid connected by an all-carbon crosslinker comprising one double bond
  C-term NH2
FTFAVYWSQLAS

SEQ ID NO: 1405 - protein, 12 aa, Artificial Sequence
  Description of Artificial Sequence: Synthetic peptide
  N-term Ac
  MOD_RES (4)..(4): Alpha-Me R8-octenyl-alanine olefin amino acid connected by an all-carbon crosslinker comprising one double bond
  misc_feature (4)..(11): Crosslink between residues
  MOD_RES (11)..(11): Alpha-Me S5-pentenyl-alanine olefin amino acid connected by an all-carbon crosslinker comprising one double bond
  C-term NH2
ITFAFYWAQLAS

SEQ ID NO: 1406 - protein, 12 aa, Artificial Sequence
  Description of Artificial Sequence: Synthetic peptide
  N-term Ac
  MOD_RES (4)..(4): Alpha-Me R8-octenyl-alanine olefin amino acid connected by an all-carbon crosslinker comprising one double bond
  misc_feature (4)..(11): Crosslink between residues
  MOD_RES (11)..(11): Alpha-Me S5-pentenyl-alanine olefin amino acid connected by an all-carbon crosslinker comprising one double bond
  C-term NH2
ITFALYWSQLAS

SEQ ID NO: 1407 - protein, 12 aa, Artificial Sequence
  Description of Artificial Sequence: Synthetic peptide
  N-term Ac
  MOD_RES (4)..(4): Alpha-Me R8-octenyl-alanine olefin amino acid connected by an all-carbon crosslinker comprising one double bond
  misc_feature (4)..(11): Crosslink between residues
  MOD_RES (11)..(11): Alpha-Me S5-pentenyl-alanine olefin amino acid connected by an all-carbon crosslinker comprising one double bond
  C-term NH2
FTFAFYWAQLAS

SEQ ID NO: 1408 - protein, 12 aa, Artificial Sequence
  Description of Artificial Sequence: Synthetic peptide
  N-term Ac
  MOD_RES (4)..(4): Alpha-Me R8-octenyl-alanine olefin amino acid connected by an all-carbon crosslinker comprising one double bond
  misc_feature (4)..(11): Crosslink between residues
  MOD_RES (11)..(11): Alpha-Me S5-pentenyl-alanine olefin amino acid connected by an all-carbon crosslinker comprising one double bond
  C-term NH2
VTFAAYWSQLAS

SEQ ID NO: 1409 - protein, 12 aa, Artificial Sequence
  Description of Artificial Sequence: Synthetic peptide
  N-term Ac
  MOD_RES (4)..(4): Alpha-Me R8-octenyl-alanine olefin amino acid connected by an all-carbon crosslinker comprising one double bond
  misc_feature (4)..(11): Crosslink between residues
  MOD_RES (11)..(11): Alpha-Me S5-pentenyl-alanine olefin amino acid connected by an all-carbon crosslinker comprising one double bond
  C-term NH2
LTFAAHWAQLAS

SEQ ID NO: 1410 - protein, 12 aa, Artificial Sequence
  Description of Artificial Sequence: Synthetic peptide
  N-term Ac
  MOD_RES (4)..(4): Alpha-Me R8-octenyl-alanine olefin amino acid connected by an all-carbon crosslinker comprising one double bond
  misc_feature (4)..(11): Crosslink between residues
  MOD_RES (11)..(11): Alpha-Me S5-pentenyl-alanine olefin amino acid connected by an all-carbon crosslinker comprising one double bond
  C-term NH2
LTFAAYWAQLAH

SEQ ID NO: 1411 - protein, 12 aa, Artificial Sequence
  Description of Artificial Sequence: Synthetic peptide
  N-term Ac
  MOD_RES (4)..(4): Alpha-Me R8-octenyl-alanine olefin amino acid connected by an all-carbon crosslinker comprising one double bond
  misc_feature (4)..(11): Crosslink between residues
  MOD_RES (11)..(11): Alpha-Me S5-pentenyl-alanine olefin amino acid connected by an all-carbon crosslinker comprising one double bond
  C-term NH2
LTFAAYWAHLAS

SEQ ID NO: 1412 - protein, 14 aa, Artificial Sequence
  Description of Artificial Sequence: Synthetic peptide
  N-term Ac
  MOD_RES (1)..(1): D-amino acid
  MOD_RES (2)..(2): 2-aminoisobutyric acid
  MOD_RES (6)..(6): Alpha-Me R8-octenyl-alanine olefin amino acid connected by an all-carbon crosslinker comprising one double bond
  misc_feature (6)..(13): Crosslink between residues
  MOD_RES (13)..(13): Alpha-Me S5-pentenyl-alanine olefin amino acid connected by an all-carbon crosslinker comprising one double bond
  C-term NH2
AXWTFAVYWSQLAS

SEQ ID NO: 1413 - protein, 13 aa, Artificial Sequence
  Description of Artificial Sequence: Synthetic peptide
  N-term Ac
  MOD_RES (1)..(1): 2-aminoisobutyric acid
  MOD_RES (5)..(5): Alpha-Me R8-octenyl-alanine olefin amino acid connected by an all-carbon crosslinker comprising one double bond
  misc_feature (5)..(12): Crosslink between residues
  MOD_RES (12)..(12): Alpha-Me S5-pentenyl-alanine olefin amino acid connected by an all-carbon crosslinker comprising one double bond
  C-term NH2
XWTFAHYWAQLAS

SEQ ID NO: 1414 - protein, 14 aa, Artificial Sequence
  Description of Artificial Sequence: Synthetic peptide
  N-term Ac
  MOD_RES (1)..(1): 2-aminoisobutyric acid
  MOD_RES (6)..(6): Alpha-Me R8-octenyl-alanine olefin amino acid connected by an all-carbon crosslinker comprising one double bond
  misc_feature (6)..(13): Crosslink between residues
  MOD_RES (13)..(13): Alpha-Me S5-pentenyl-alanine olefin amino acid connected by an all-carbon crosslinker comprising one double bond
  C-term NH2
XAWTFAHYWAQLAS

SEQ ID NO: 1415 - protein, 13 aa, Artificial Sequence
  Description of Artificial Sequence: Synthetic peptide
  N-term Ac
  MOD_RES (1)..(1): D-amino acid
  MOD_RES (5)..(5): Alpha-Me R8-octenyl-alanine olefin amino acid connected by an all-carbon crosslinker comprising one double bond
  misc_feature (5)..(12): Crosslink between residues
  MOD_RES (12)..(12): Alpha-Me S5-pentenyl-alanine olefin amino acid connected by an all-carbon crosslinker comprising one double bond
  C-term NH2
FWTFAHYWAQLAS

SEQ ID NO: 1416 - protein, 14 aa, Artificial Sequence
  Description of Artificial Sequence: Synthetic peptide
  N-term Ac
  MOD_RES (1)..(1): 2-aminoisobutyric acid
  MOD_RES (6)..(6): Alpha-Me R8-octenyl-alanine olefin amino acid connected by an all-carbon crosslinker comprising one double bond
  misc_feature (6)..(13): Crosslink between residues
  MOD_RES (13)..(13): Alpha-Me S5-pentenyl-alanine olefin amino acid connected by an all-carbon crosslinker comprising one double bond
  C-term NH2
XWWTFAHYWAQLAS

SEQ ID NO: 1417 - protein, 12 aa, Artificial Sequence
  Description of Artificial Sequence: Synthetic peptide
  N-term Ac
  MOD_RES (4)..(4): Alpha-Me R8-octenyl-alanine olefin amino acid connected by an all-carbon crosslinker comprising one double bond
  misc_feature (4)..(11): Crosslink between residues
  MOD_RES (11)..(11): Alpha-Me S5-pentenyl-alanine olefin amino acid connected by an all-carbon crosslinker comprising one double bond
  C-term NH2
WTFALYWSQLAS

SEQ ID NO: 1418 - protein, 12 aa, Artificial Sequence
  Description of Artificial Sequence: Synthetic peptide
  N-term Ac
  MOD_RES (4)..(4): Alpha-Me R8-octenyl-alanine olefin amino acid connected by an all-carbon crosslinker comprising one double bond
  misc_feature (4)..(11): Crosslink between residues
  MOD_RES (5)..(5): Norleucine
  MOD_RES (11)..(11): Alpha-Me S5-pentenyl-alanine olefin amino acid connected by an all-carbon crosslinker comprising one double bond
  C-term NH2
WTFALYWSQLAS

SEQ ID NO: 1419 - protein, 12 aa, Artificial Sequence
  Description of Artificial Sequence: Synthetic peptide
  N-term Ac
  MOD_RES (4)..(4): Alpha-Me R8-octenyl-alanine olefin amino acid connected by an all-carbon crosslinker comprising one double bond
  misc_feature (4)..(11): Crosslink between residues
  MOD_RES (11)..(11): Alpha-Me S5-pentenyl-alanine olefin amino acid connected by an all-carbon crosslinker comprising one double bond
  MOD_RES (12)..(12): D-amino acid
  C-term NH2
LTFAAYWSQLAA

SEQ ID NO: 1420 - protein, 12 aa, Artificial Sequence
  Description of Artificial Sequence: Synthetic peptide
  N-term Ac
  MOD_RES (4)..(4): Alpha-Me R8-octenyl-alanine olefin amino acid connected by an all-carbon crosslinker comprising one double bond
  misc_feature (4)..(11): Crosslink between residues
  MOD_RES (11)..(11): Alpha-Me S5-pentenyl-alanine olefin amino acid connected by an all-carbon crosslinker comprising one double bond
  C-term NH2
LTFAEYWARLAA

SEQ ID NO: 1421 - protein, 12 aa, Artificial Sequence
  Description of Artificial Sequence: Synthetic peptide
  N-term Ac
  MOD_RES (4)..(4): Alpha-Me R8-octenyl-alanine olefin amino acid connected by an all-carbon crosslinker comprising one double bond
  misc_feature (4)..(11): Crosslink between residues
  MOD_RES (11)..(11): Alpha-Me S5-pentenyl-alanine olefin amino acid connected by an all-carbon crosslinker comprising one double bond
  C-term NH2
LTFAEYWAHLAA

SEQ ID NO: 1422 - protein, 12 aa, Artificial Sequence
  Description of Artificial Sequence: Synthetic peptide
  N-term Ac
  MOD_RES (1)..(1): D-amino acid
  MOD_RES (4)..(4): Alpha-Me R8-octenyl-alanine olefin amino acid connected by an all-carbon crosslinker comprising one double bond
  misc_feature (4)..(11): Crosslink between residues
  MOD_RES (11)..(11): Alpha-Me S5-pentenyl-alanine olefin amino acid connected by an all-carbon crosslinker comprising one double bond
  C-term NH2
ATFAAYWAQLAS

SEQ ID NO: 1423 - protein, 12 aa, Artificial Sequence
  Description of Artificial Sequence: Synthetic peptide
  N-term Ac
  MOD_RES (1)..(1): 2-aminoisobutyric acid
  MOD_RES (4)..(4): Alpha-Me R8-octenyl-alanine olefin amino acid connected by an all-carbon crosslinker comprising one double bond
  misc_feature (4)..(11): Crosslink between residues
  MOD_RES (11)..(11): Alpha-Me S5-pentenyl-alanine olefin amino acid connected by an all-carbon crosslinker comprising one double bond
  C-term NH2
XTFAAYWAQLAS

SEQ ID NO: 1424 - protein, 12 aa, Artificial Sequence
  Description of Artificial Sequence: Synthetic peptide
  N-term Ac
  MOD_RES (1)..(1): Alpha-Me-Phe
  MOD_RES (4)..(4): Alpha-Me R8-octenyl-alanine olefin amino acid connected by an all-carbon crosslinker comprising one double bond
  misc_feature (4)..(11): Crosslink between residues
  MOD_RES (11)..(11): Alpha-Me S5-pentenyl-alanine olefin amino acid connected by an all-carbon crosslinker comprising one double bond
  C-term NH2
FTFAAYWAQLAS

SEQ ID NO: 1425 - protein, 12 aa, Artificial Sequence
  Description of Artificial Sequence: Synthetic peptide
  N-term Ac
  MOD_RES (1)..(1): Alpha-Me-Trp
  MOD_RES (4)..(4): Alpha-Me R8-octenyl-alanine olefin amino acid connected by an all-carbon crosslinker comprising one double bond
  misc_feature (4)..(11): Crosslink between residues
  MOD_RES (11)..(11): Alpha-Me S5-pentenyl-alanine olefin amino acid connected by an all-carbon crosslinker comprising one double bond
  C-term NH2
WTFAAYWAQLAS

SEQ ID NO: 1426 - protein, 12 aa, Artificial Sequence
  Description of Artificial Sequence: Synthetic peptide
  N-term Ac
  MOD_RES (1)..(1): N-methyl-Leu
  MOD_RES (4)..(4): Alpha-Me R8-octenyl-alanine olefin amino acid connected by an all-carbon crosslinker comprising one double bond
  misc_feature (4)..(11): Crosslink between residues
  MOD_RES (11)..(11): Alpha-Me S5-pentenyl-alanine olefin amino acid connected by an all-carbon crosslinker comprising one double bond
  C-term NH2
LTFAAYWAQLAS

SEQ ID NO: 1427 - protein, 12 aa, Artificial Sequence
  Description of Artificial Sequence: Synthetic peptide
  N-term Ac
  MOD_RES (2)..(2): N-methyl-Thr
  MOD_RES (4)..(4): Alpha-Me R8-octenyl-alanine olefin amino acid connected by an all-carbon crosslinker comprising one double bond
  misc_feature (4)..(11): Crosslink between residues
  MOD_RES (11)..(11): Alpha-Me S5-pentenyl-alanine olefin amino acid connected by an all-carbon crosslinker comprising one double bond
  C-term NH2
LTFAAYWAQLAS

SEQ ID NO: 1428 - protein, 12 aa, Artificial Sequence
  Description of Artificial Sequence: Synthetic peptide
  N-term Ac
  MOD_RES (2)..(2): Sarcosine
  MOD_RES (4)..(4): Alpha-Me R8-octenyl-alanine olefin amino acid connected by an all-carbon crosslinker comprising one double bond
  misc_feature (4)..(11): Crosslink between residues
  MOD_RES (11)..(11): Alpha-Me S5-pentenyl-alanine olefin amino acid connected by an all-carbon crosslinker comprising one double bond
  C-term NH2
LXFAAYWAQLAS

SEQ ID NO: 1429 - protein, 11 aa, Artificial Sequence
  Description of Artificial Sequence: Synthetic peptide
  N-term Ac
  MOD_RES (3)..(3): Alpha-Me R8-octenyl-alanine olefin amino acid connected by an all-carbon crosslinker comprising one double bond
  misc_feature (3)..(10): Crosslink between residues
  MOD_RES (10)..(10): Alpha-Me S5-pentenyl-alanine olefin amino acid connected by an all-carbon crosslinker comprising one double bond
  C-term NH2
TFAAYWAQLAS

SEQ ID NO: 1430 - protein, 12 aa, Artificial Sequence
  Description of Artificial Sequence: Synthetic peptide
  N-term Ac
  MOD_RES (4)..(4): Alpha-Me R8-octenyl-alanine olefin amino acid connected by an all-carbon crosslinker comprising one double bond
  misc_feature (4)..(11): Crosslink between residues
  MOD_RES (11)..(11): Alpha-Me S5-pentenyl-alanine olefin amino acid connected by an all-carbon crosslinker comprising one double bond
  C-term NH2
ETFAAYWAQLAA

SEQ ID NO: 1431 - protein, 12 aa, Artificial Sequence
  Description of Artificial Sequence: Synthetic peptide
  N-term Ac
  MOD_RES (4)..(4): Alpha-Me R8-octenyl-alanine olefin amino acid connected by an all-carbon crosslinker comprising one double bond
  misc_feature (4)..(11): Crosslink between residues
  MOD_RES (11)..(11): Alpha-Me S5-pentenyl-alanine olefin amino acid connected by an all-carbon crosslinker comprising one double bond
  C-term NH2
LTFAEYWAQLAA

SEQ ID NO: 1432 - protein, 12 aa, Artificial Sequence
  Description of Artificial Sequence: Synthetic peptide
  N-term Ac
  MOD_RES (4)..(4): Alpha-Me R8-octenyl-alanine olefin amino acid connected by an all-carbon crosslinker comprising one double bond
  misc_feature (4)..(11): Crosslink between residues
  MOD_RES (11)..(11): Alpha-Me S5-pentenyl-alanine olefin amino acid connected by an all-carbon crosslinker comprising one double bond
  C-term NH2
WTFAVYWSQLAS

SEQ ID NO: 1433 - protein, 12 aa, Artificial Sequence
  Description of Artificial Sequence: Synthetic peptide
  N-term Ac
  MOD_RES (4)..(4): Alpha-Me R8-octenyl-alanine olefin amino acid connected by an all-carbon crosslinker comprising one double bond
  misc_feature (4)..(11): Crosslink between residues
  MOD_RES (11)..(11): Alpha-Me S5-pentenyl-alanine olefin amino acid connected by an all-carbon crosslinker comprising one double bond
  C-term NH2
YTFAFYWSQLAS

SEQ ID NO: 1434 - protein, 10 aa, Artificial Sequence
  Description of Artificial Sequence: Synthetic peptide
  N-term Ac
  MOD_RES (2)..(2): Alpha-Me R8-octenyl-alanine olefin amino acid connected by an all-carbon crosslinker comprising one double bond
  misc_feature (2)..(9): Crosslink between residues
  MOD_RES (5)..(5): 6cl-Trp
  MOD_RES (9)..(9): Alpha-Me S5-pentenyl-alanine olefin amino acid connected by an all-carbon crosslinker comprising one double bond
  C-term NH2
FAAYWSALAA

SEQ ID NO: 1435 - protein, 12 aa, Artificial Sequence
  Description of Artificial Sequence: Synthetic peptide
  N-term Ac
  MOD_RES (4)..(4): Alpha-Me R8-octenyl-alanine olefin amino acid connected by an all-carbon crosslinker comprising one double bond
  misc_feature (4)..(11): Crosslink between residues
  MOD_RES (11)..(11): Alpha-Me S5-pentenyl-alanine olefin amino acid connected by an all-carbon crosslinker comprising one double bond
  C-term NH2
ETFAEYWVQLAS

SEQ ID NO: 1436 - protein, 12 aa, Artificial Sequence
  Description of Artificial Sequence: Synthetic peptide
  N-term Ac
  MOD_RES (4)..(4): Alpha-Me R8-octenyl-alanine olefin amino acid connected by an all-carbon crosslinker comprising one double bond
  misc_feature (4)..(11): Crosslink between residues
  MOD_RES (11)..(11): Alpha-Me S5-pentenyl-alanine olefin amino acid connected by an all-carbon crosslinker comprising one double bond
  C-term NH2
ETFAEHWAQLAA

SEQ ID NO: 1437 - protein, 12 aa, Artificial Sequence
  Description of Artificial Sequence: Synthetic peptide
  N-term Ac
  MOD_RES (4)..(4): Alpha-Me R8-octenyl-alanine olefin amino acid connected by an all-carbon crosslinker comprising one double bond
  misc_feature (4)..(11): Crosslink between residues
  MOD_RES (11)..(11): Alpha-Me S5-pentenyl-alanine olefin amino acid connected by an all-carbon crosslinker comprising one double bond
  C-term NH2
ITFAEYWAQLAS

SEQ ID NO: 1438 - protein, 12 aa, Artificial Sequence
  Description of Artificial Sequence: Synthetic peptide
  N-term Ac
  MOD_RES (4)..(4): Alpha-Me R8-octenyl-alanine olefin amino acid connected by an all-carbon crosslinker comprising one double bond
  misc_feature (4)..(11): Crosslink between residues
  MOD_RES (11)..(11): Alpha-Me S5-pentenyl-alanine olefin amino acid connected by an all-carbon crosslinker comprising one double bond
  C-term NH2
ITFAEHWVQLAA

SEQ ID NO: 1439 - protein, 12 aa, Artificial Sequence
  Description of Artificial Sequence: Synthetic peptide
  N-term Ac
  MOD_RES (4)..(4): Alpha-Me R8-octenyl-alanine olefin amino acid connected by an all-carbon crosslinker comprising one double bond
  misc_feature (4)..(11): Crosslink between residues
  MOD_RES (11)..(11): Alpha-Me S5-pentenyl-alanine olefin amino acid connected by an all-carbon crosslinker comprising one double bond
  C-term NH2
ITFAEHWAQLAS

SEQ ID NO: 1440 - protein, 12 aa, Artificial Sequence
  Description of Artificial Sequence: Synthetic peptide
  N-term Ac
  MOD_RES (3)..(3): Phe-4F
  MOD_RES (4)..(4): Alpha-Me R8-octenyl-alanine olefin amino acid connected by an all-carbon crosslinker comprising one double bond
  misc_feature (4)..(11): Crosslink between residues
  MOD_RES (10)..(10): Cyclobutyl-Ala
  MOD_RES (11)..(11): Alpha-Me S5-pentenyl-alanine olefin amino acid connected by an all-carbon crosslinker comprising one double bond
  C-term NH2
LTFAAYWAQAAS

SEQ ID NO: 1441 - protein, 12 aa, Artificial Sequence
  Description of Artificial Sequence: Synthetic peptide
  N-term Ac
  MOD_RES (3)..(3): 3-Chloro-Phe
  MOD_RES (4)..(4): Alpha-Me R8-octenyl-alanine olefin amino acid connected by an all-carbon crosslinker comprising one double bond
  misc_feature (4)..(11): Crosslink between residues
  MOD_RES (10)..(10): hLeu
  MOD_RES (11)..(11): Alpha-Me S5-pentenyl-alanine olefin amino acid connected by an all-carbon crosslinker comprising one double bond
  C-term NH2
LTFAAYWAQLAS

SEQ ID NO: 1442 - protein, 12 aa, Artificial Sequence
  Description of Artificial Sequence: Synthetic peptide
  N-term Ac
  MOD_RES (3)..(3): 3-Chloro-Phe
  MOD_RES (4)..(4): Alpha-Me R8-octenyl-alanine olefin amino acid connected by an all-carbon crosslinker comprising one double bond
  misc_feature (4)..(11): Crosslink between residues
  MOD_RES (10)..(10): Cyclohexyl-Ala
  MOD_RES (11)..(11): Alpha-Me S5-pentenyl-alanine olefin amino acid connected by an all-carbon crosslinker comprising one double bond
  C-term NH2
LTFAAYWAQAAS

SEQ ID NO: 1443 - protein, 12 aa, Artificial Sequence
  Description of Artificial Sequence: Synthetic peptide
  N-term Ac
  MOD_RES (3)..(3): 3-Chloro-Phe
  MOD_RES (4)..(4): Alpha-Me R8-octenyl-alanine olefin amino acid connected by an all-carbon crosslinker comprising one double bond
  misc_feature (4)..(11): Crosslink between residues
  MOD_RES (10)..(10): Cyclohexyl-Gly
  MOD_RES (11)..(11): Alpha-Me S5-pentenyl-alanine olefin amino acid connected by an all-carbon crosslinker comprising one double bond
  C-term NH2
LTFAAYWAQGAS

SEQ ID NO: 1444 - protein, 12 aa, Artificial Sequence
  Description of Artificial Sequence: Synthetic peptide
  N-term Ac
  MOD_RES (3)..(3): 3-Chloro-Phe
  MOD_RES (4)..(4): Alpha-Me R8-octenyl-alanine olefin amino acid connected by an all-carbon crosslinker comprising one double bond
  misc_feature (4)..(11): Crosslink between residues
  MOD_RES (10)..(10): Cyclobutyl-Ala
  MOD_RES (11)..(11): Alpha-Me S5-pentenyl-alanine olefin amino acid connected by an all-carbon crosslinker comprising one double bond
  C-term NH2
LTFAAYWAQAAS

SEQ ID NO: 1445 - protein, 12 aa, Artificial Sequence
  Description of Artificial Sequence: Synthetic peptide
  N-term Ac
  MOD_RES (4)..(4): Alpha-Me R8-octenyl-alanine olefin amino acid connected by an all-carbon crosslinker comprising one double bond
  misc_feature (4)..(11): Crosslink between residues
  MOD_RES (7)..(7): 6cl-Trp
  MOD_RES (11)..(11): Alpha-Me S5-pentenyl-alanine olefin amino acid connected by an all-carbon crosslinker comprising one double bond
  C-term NH2
LTFAAYWSQLAS

SEQ ID NO: 1446 - protein, 12 aa, Artificial Sequence
  Description of Artificial Sequence: Synthetic peptide
  N-term Ac
  MOD_RES (3)..(3): Phe-4F
  MOD_RES (4)..(4): Alpha-Me R8-octenyl-alanine olefin amino acid connected by an all-carbon crosslinker comprising one double bond
  misc_feature (4)..(11): Crosslink between residues
  MOD_RES (10)..(10): hLeu
  MOD_RES (11)..(11): Alpha-Me S5-pentenyl-alanine olefin amino acid connected by an all-carbon crosslinker comprising one double bond
  C-term NH2
LTFAHYWAQLAS

SEQ ID NO: 1447 - protein, 12 aa, Artificial Sequence
  Description of Artificial Sequence: Synthetic peptide
  N-term Ac
  MOD_RES (3)..(3): Phe-4F
  MOD_RES (4)..(4): Alpha-Me R8-octenyl-alanine olefin amino acid connected by an all-carbon crosslinker comprising one double bond
  misc_feature (4)..(11): Crosslink between residues
  MOD_RES (10)..(10): Cyclobutyl-Ala
  MOD_RES (11)..(11): Alpha-Me S5-pentenyl-alanine olefin amino acid connected by an all-carbon crosslinker comprising one double bond
  C-term NH2
LTFAHYWAQAAS

SEQ ID NO: 1448 - protein, 12 aa, Artificial Sequence
  Description of Artificial Sequence: Synthetic peptide
  N-term Ac
  MOD_RES (3)..(3): Phe-4F
  MOD_RES (4)..(4): Alpha-Me R8-octenyl-alanine olefin amino acid connected by an all-carbon crosslinker comprising one double bond
  misc_feature (4)..(11): Crosslink between residues
  MOD_RES (10)..(10): hLeu
  MOD_RES (11)..(11): Alpha-Me S5-pentenyl-alanine olefin amino acid connected by an all-carbon crosslinker comprising one double bond
  C-term NH2
LTFAAYWAQLAS

SEQ ID NO: 1449 - protein, 12 aa, Artificial Sequence
  Description of Artificial Sequence: Synthetic peptide
  N-term Ac
  MOD_RES (3)..(3): Phe-4F
  MOD_RES (4)..(4): Alpha-Me R8-octenyl-alanine olefin amino acid connected by an all-carbon crosslinker comprising one double bond
  misc_feature (4)..(11): Crosslink between residues
  MOD_RES (10)..(10): Cyclohexyl-Gly
  MOD_RES (11)..(11): Alpha-Me S5-pentenyl-alanine olefin amino acid connected by an all-carbon crosslinker comprising one double bond
  C-term NH2
LTFAAYWAQGAS

SEQ ID NO: 1450 - protein, 12 aa, Artificial Sequence
  Description of Artificial Sequence: Synthetic peptide
  N-term Ac
  MOD_RES (4)..(4): Alpha-Me R8-octenyl-alanine olefin amino acid connected by an all-carbon crosslinker comprising one double bond
  misc_feature (4)..(11): Crosslink between residues
  MOD_RES (11)..(11): Alpha-Me S5-pentenyl-alanine olefin amino acid connected by an all-carbon crosslinker comprising one double bond
  C-term NH2
ETFAEYWVALAS

SEQ ID NO: 1451 - protein, 12 aa, Artificial Sequence
  Description of Artificial Sequence: Synthetic peptide
  N-term Ac
  MOD_RES (4)..(4): Alpha-Me R8-octenyl-alanine olefin amino acid connected by an all-carbon crosslinker comprising one double bond
  misc_feature (4)..(11): Crosslink between residues
  MOD_RES (11)..(11): Alpha-Me S5-pentenyl-alanine olefin amino acid connected by an all-carbon crosslinker comprising one double bond
  C-term NH2
ETFAEHWAALAA

SEQ ID NO: 1452 - protein, 12 aa, Artificial Sequence
  Description of Artificial Sequence: Synthetic peptide
  N-term Ac
  MOD_RES (4)..(4): Alpha-Me R8-octenyl-alanine olefin amino acid connected by an all-carbon crosslinker comprising one double bond
  misc_feature (4)..(11): Crosslink between residues
  MOD_RES (11)..(11): Alpha-Me S5-pentenyl-alanine olefin amino acid connected by an all-carbon crosslinker comprising one double bond
  C-term NH2
ITFAEYWAALAS

SEQ ID NO: 1453 - protein, 12 aa, Artificial Sequence
  Description of Artificial Sequence: Synthetic peptide
  N-term Ac
  MOD_RES (4)..(4): Alpha-Me R8-octenyl-alanine olefin amino acid connected by an all-carbon crosslinker comprising one double bond
  misc_feature (4)..(11): Crosslink between residues
  MOD_RES (11)..(11): Alpha-Me S5-pentenyl-alanine olefin amino acid connected by an all-carbon crosslinker comprising one double bond
  C-term NH2
ITFAEHWVALAA

SEQ ID NO: 1454 - protein, 12 aa, Artificial Sequence
  Description of Artificial Sequence: Synthetic peptide
  N-term Ac
  MOD_RES (4)..(4): Alpha-Me R8-octenyl-alanine olefin amino acid connected by an all-carbon crosslinker comprising one double bond
  misc_feature (4)..(11): Crosslink between residues
  MOD_RES (11)..(11): Alpha-Me S5-pentenyl-alanine olefin amino acid connected by an all-carbon crosslinker comprising one double bond
  C-term NH2
ITFAEHWAALAS

SEQ ID NO: 1455 - protein, 12 aa, Artificial Sequence
  Description of Artificial Sequence: Synthetic peptide
  N-term Pam
  MOD_RES (4)..(4): Alpha-Me R8-octenyl-alanine olefin amino acid connected by an all-carbon crosslinker comprising one double bond
  misc_feature (4)..(11): Crosslink between residues
  MOD_RES (11)..(11): Alpha-Me S5-pentenyl-alanine olefin amino acid connected by an all-carbon crosslinker comprising one double bond
  C-term NH2
LTFAEYWAQLAS

SEQ ID NO: 1456 - protein, 12 aa, Artificial Sequence
  Description of Artificial Sequence: Synthetic peptide
  N-term Pam
  MOD_RES (4)..(4): Alpha-Me R8-octenyl-alanine olefin amino acid connected by an all-carbon crosslinker comprising one double bond
  misc_feature (4)..(11): Crosslink between residues
  MOD_RES (11)..(11): Alpha-Me S5-pentenyl-alanine olefin amino acid connected by an all-carbon crosslinker comprising one double bond
  C-term NH2
ETFAEYWAQLAS

SEQ ID NO: 1457 - protein, 12 aa, Artificial Sequence
  Description of Artificial Sequence: Synthetic peptide
  N-term Ac
  MOD_RES (4)..(4): Alpha-Me R8-octenyl-alanine olefin amino acid connected by an all-carbon crosslinker comprising one double bond
  misc_feature (4)..(11): Crosslink between residues
  MOD_RES (11)..(11): Alpha-Me S5-pentenyl-alanine olefin amino acid connected by an all-carbon crosslinker comprising one double bond
  C-term NH2
LTFAAYWLQLAS

SEQ ID NO: 1458 - protein, 12 aa, Artificial Sequence
  Description of Artificial Sequence: Synthetic peptide
  N-term Ac
  MOD_RES (4)..(4): Alpha-Me R8-octenyl-alanine olefin amino acid connected by an all-carbon crosslinker comprising one double bond
  misc_feature (4)..(11): Crosslink between residues
  MOD_RES (11)..(11): Alpha-Me S5-pentenyl-alanine olefin amino acid connected by an all-carbon crosslinker comprising one double bond
  C-term NH2
LTFAEYWLQLAS

SEQ ID NO: 1459 - protein, 12 aa, Artificial Sequence
  Description of Artificial Sequence: Synthetic peptide
  N-term Ac
  MOD_RES (4)..(4): Alpha-Me R8-octenyl-alanine olefin amino acid connected by an all-carbon crosslinker comprising one double bond
  misc_feature (4)..(11): Crosslink between residues
  MOD_RES (11)..(11): Alpha-Me S5-pentenyl-alanine olefin amino acid connected by an all-carbon crosslinker comprising one double bond
  C-term NH2
LTFAEHWLQLAS

SEQ ID NO: 1460 - protein, 12 aa, Artificial Sequence
  Description of Artificial Sequence: Synthetic peptide
  N-term Ac
  MOD_RES (4)..(4): Alpha-Me R8-octenyl-alanine olefin amino acid connected by an all-carbon crosslinker comprising one double bond
  misc_feature (4)..(11): Crosslink between residues
  MOD_RES (11)..(11): Alpha-Me S5-pentenyl-alanine olefin amino acid connected by an all-carbon crosslinker comprising one double bond
  C-term NH2
LTFAVYWAQLAS

SEQ ID NO: 1461 - protein, 12 aa, Artificial Sequence
  Description of Artificial Sequence: Synthetic peptide
  N-term Ac
  MOD_RES (4)..(4): Alpha-Me R8-octenyl-alanine olefin amino acid connected by an all-carbon crosslinker comprising one double bond
  misc_feature (4)..(11): Crosslink between residues
  MOD_RES (11)..(11): Alpha-Me S5-pentenyl-alanine olefin amino acid connected by an all-carbon crosslinker comprising one double bond
  C-term NH2
LTFAAYWSQLAS

SEQ ID NO: 1462 - protein, 12 aa, Artificial Sequence
  Description of Artificial Sequence: Synthetic peptide
  N-term Ac
  MOD_RES (4)..(4): Alpha-Me R8-octenyl-alanine olefin amino acid connected by an all-carbon crosslinker comprising one double bond
  misc_feature (4)..(11): Crosslink between residues
  MOD_RES (11)..(11): Alpha-Me S5-pentenyl-alanine olefin amino acid connected by an all-carbon crosslinker comprising one double bond
  C-term NH2
ETFAAYWAQLAS

SEQ ID NO: 1463 - protein, 12 aa, Artificial Sequence
  Description of Artificial Sequence: Synthetic peptide
  N-term Ac
  MOD_RES (4)..(4): Alpha-Me R8-octenyl-alanine olefin amino acid connected by an all-carbon crosslinker comprising one double bond
  misc_feature (4)..(11): Crosslink between residues
  MOD_RES (11)..(11): Alpha-Me S5-pentenyl-alanine olefin amino acid connected by an all-carbon crosslinker comprising one double bond
  C-term NH2
LTFAEYWAQLAS

SEQ ID NO: 1464 - protein, 12 aa, Artificial Sequence
  Description of Artificial Sequence: Synthetic peptide
  N-term Ac
  MOD_RES (4)..(4): Alpha-Me R8-octenyl-alanine olefin amino acid connected by an all-carbon crosslinker comprising one double bond
  misc_feature (4)..(11): Crosslink between residues
  MOD_RES (11)..(11): Alpha-Me S5-pentenyl-alanine olefin amino acid connected by an all-carbon crosslinker comprising one double bond
  C-term NHAm
LTFAHYWAQLAS

SEQ ID NO: 1465 - protein, 12 aa, Artificial Sequence
  Description of Artificial Sequence: Synthetic peptide
  N-term Ac
  MOD_RES (4)..(4): Alpha-Me R8-octenyl-alanine olefin amino acid connected by an all-carbon crosslinker comprising one double bond
  misc_feature (4)..(11): Crosslink between residues
  MOD_RES (11)..(11): Alpha-Me S5-pentenyl-alanine olefin amino acid connected by an all-carbon crosslinker comprising one double bond
  C-term NHiAm
LTFAHYWAQLAS

SEQ ID NO: 1466 - protein, 12 aa, Artificial Sequence
  Description of Artificial Sequence: Synthetic peptide
  N-term Ac
  MOD_RES (4)..(4): Alpha-Me R8-octenyl-alanine olefin amino acid connected by an all-carbon crosslinker comprising one double bond
  misc_feature (4)..(11): Crosslink between residues
  MOD_RES (11)..(11): Alpha-Me S5-pentenyl-alanine olefin amino acid connected by an all-carbon crosslinker comprising one double bond
  C-term NHnPr3Ph
LTFAHYWAQLAS

SEQ ID NO: 1467 - protein, 12 aa, Artificial Sequence
  Description of Artificial Sequence: Synthetic peptide
  N-term Ac
  MOD_RES (4)..(4): Alpha-Me R8-octenyl-alanine olefin amino acid connected by an all-carbon crosslinker comprising one double bond
  misc_feature (4)..(11): Crosslink between residues
  MOD_RES (11)..(11): Alpha-Me S5-pentenyl-alanine olefin amino acid connected by an all-carbon crosslinker comprising one double bond
  C-term NHnBu3,3Me
LTFAHYWAQLAS

SEQ ID NO: 1468 - protein, 12 aa, Artificial Sequence
  Description of Artificial Sequence: Synthetic peptide
  N-term Ac
  MOD_RES (4)..(4): Alpha-Me R8-octenyl-alanine olefin amino acid connected by an all-carbon crosslinker comprising one double bond
  misc_feature (4)..(11): Crosslink between residues
  MOD_RES (11)..(11): Alpha-Me S5-pentenyl-alanine olefin amino acid connected by an all-carbon crosslinker comprising one double bond
  C-term NHnBu
LTFAHYWAQLAS

SEQ ID NO: 1469 - protein, 12 aa, Artificial Sequence
  Description of Artificial Sequence: Synthetic peptide
  N-term Ac
  MOD_RES (4)..(4): Alpha-Me R8-octenyl-alanine olefin amino acid connected by an all-carbon crosslinker comprising one double bond
  misc_feature (4)..(11): Crosslink between residues
  MOD_RES (11)..(11): Alpha-Me S5-pentenyl-alanine olefin amino acid connected by an all-carbon crosslinker comprising one double bond
  C-term NHnPr
LTFAHYWAQLAS

SEQ ID NO: 1470 - protein, 12 aa, Artificial Sequence
  Description of Artificial Sequence: Synthetic peptide
  N-term Ac
  MOD_RES (4)..(4): Alpha-Me R8-octenyl-alanine olefin amino acid connected by an all-carbon crosslinker comprising one double bond
  misc_feature (4)..(11): Crosslink between residues
  MOD_RES (11)..(11): Alpha-Me S5-pentenyl-alanine olefin amino acid connected by an all-carbon crosslinker comprising one double bond
  C-term NHnEt2Ch
LTFAHYWAQLAS

SEQ ID NO: 1471 - protein, 12 aa, Artificial Sequence
  Description of Artificial Sequence: Synthetic peptide
  N-term Ac
  MOD_RES (4)..(4): Alpha-Me R8-octenyl-alanine olefin amino acid connected by an all-carbon crosslinker comprising one double bond
  misc_feature (4)..(11): Crosslink between residues
  MOD_RES (11)..(11): Alpha-Me S5-pentenyl-alanine olefin amino acid connected by an all-carbon crosslinker comprising one double bond
  C-term NHHex
LTFAHYWAQLAS

SEQ ID NO: 1472 - protein, 12 aa, Artificial Sequence
  Description of Artificial Sequence: Synthetic peptide
  N-term Ac
  MOD_RES (4)..(4): Alpha-Me R8-octenyl-alanine olefin amino acid connected by an all-carbon crosslinker comprising one double bond
  misc_feature (4)..(11): Crosslink between residues
  MOD_RES (11)..(11): Alpha-Me S5-pentenyl-alanine olefin amino acid connected by an all-carbon crosslinker comprising one double bond
  C-term NHmdPeg2
LTFAAYWAQLAS

SEQ ID NO: 1473 - protein, 12 aa, Artificial Sequence
  Description of Artificial Sequence: Synthetic peptide
  N-term Ac
  MOD_RES (4)..(4): Alpha-Me R8-octenyl-alanine olefin amino acid connected by an all-carbon crosslinker comprising one double bond
  misc_feature (4)..(11): Crosslink between residues
  MOD_RES (11)..(11): Alpha-Me S5-pentenyl-alanine olefin amino acid connected by an all-carbon crosslinker comprising one double bond
  C-term NHmdPeg2
LTFAAYWAQLAA

SEQ ID NO: 1474 - protein, 12 aa, Artificial Sequence
  Description of Artificial Sequence: Synthetic peptide
  N-term Ac
  MOD_RES (4)..(4): Alpha-Me R5-pentenyl-alanine olefin amino acid connected by an all-carbon crosslinker comprising one double bond
  misc_feature (4)..(11): Crosslink between residues
  MOD_RES (11)..(11): Alpha-Me S8-octenyl-alanine olefin amino acid connected by an all-carbon crosslinker comprising one double bond
  C-term NH2
LTFAAYWAALAS

SEQ ID NO: 1475 - protein, 12 aa, Artificial Sequence
  Description of Artificial Sequence: Synthetic peptide
  N-term Ac
  MOD_RES (4)..(4): Alpha-Me R8-octenyl-alanine olefin amino acid connected by an all-carbon crosslinker comprising one double bond
  misc_feature (4)..(11): Crosslink between residues
  MOD_RES (8)..(8): Cou
  MOD_RES (11)..(11): Alpha-Me S5-pentenyl-alanine olefin amino acid connected by an all-carbon crosslinker comprising one double bond
  C-term NH2
LTFAAYWXQLAS

SEQ ID NO: 1476 - protein, 12 aa, Artificial Sequence
  Description of Artificial Sequence: Synthetic peptide
  N-term Ac
  MOD_RES (4)..(4): Alpha-Me R8-octenyl-alanine olefin amino acid connected by an all-carbon crosslinker comprising one double bond
  misc_feature (4)..(11): Crosslink between residues
  MOD_RES (5)..(5): Cou
  MOD_RES (11)..(11): Alpha-Me S5-pentenyl-alanine olefin amino acid connected by an all-carbon crosslinker comprising one double bond
  C-term NH2
LTFAXYWAQLAS

SEQ ID NO: 1477 - protein, 12 aa, Artificial Sequence
  Description of Artificial Sequence: Synthetic peptide
  N-term Ac
  MOD_RES (1)..(1): Cou
  MOD_RES (4)..(4): Alpha-Me R8-octenyl-alanine olefin amino acid connected by an all-carbon crosslinker comprising one double bond
  misc_feature (4)..(11): Crosslink between residues
  MOD_RES (11)..(11): Alpha-Me S5-pentenyl-alanine olefin amino acid connected by an all-carbon crosslinker comprising one double bond
  C-term NH2
XTFAAYWAQLAS

SEQ ID NO: 1478 - protein, 12 aa, Artificial Sequence
  Description of Artificial Sequence: Synthetic peptide
  N-term H
  MOD_RES (4)..(4): Alpha-Me R8-octenyl-alanine olefin amino acid connected by an all-carbon crosslinker comprising one double bond
  misc_feature (4)..(11): Crosslink between residues
  MOD_RES (11)..(11): Alpha-Me S5-pentenyl-alanine olefin amino acid connected by an all-carbon crosslinker comprising one double bond
  C-term NH2
LTFAAYWAQLAA

SEQ ID NO: 1479 - protein, 12 aa, Artificial Sequence
  Description of Artificial Sequence: Synthetic peptide
  N-term Ac
  MOD_RES (4)..(4): Alpha-Me R8-octenyl-alanine olefin amino acid connected by an all-carbon crosslinker comprising one double bond
  misc_feature (4)..(11): Crosslink between residues
  MOD_RES (11)..(11): Alpha-Me S5-pentenyl-alanine olefin amino acid connected by an all-carbon crosslinker comprising one double bond
  C-term NH2
HHFAAYWAQLAS

SEQ ID NO: 1480 - protein, 12 aa, Artificial Sequence
  Description of Artificial Sequence: Synthetic peptide
  N-term Ac
  MOD_RES (3)..(3): 2-Naphthalanine
  MOD_RES (4)..(4): Alpha-Me R8-octenyl-alanine olefin amino acid connected by an all-carbon crosslinker comprising one double bond
  misc_feature (4)..(11): Crosslink between residues
  MOD_RES (11)..(11): Alpha-Me S5-pentenyl-alanine olefin amino acid connected by an all-carbon crosslinker comprising one double bond
  C-term NH2
LTAAAYWSQLAS

SEQ ID NO: 1481 - protein, 12 aa, Artificial Sequence
  Description of Artificial Sequence: Synthetic peptide
  N-term Ac
  MOD_RES (4)..(4): Alpha-Me R8-octenyl-alanine olefin amino acid connected by an all-carbon crosslinker comprising one double bond
  misc_feature (4)..(11): Crosslink between residues
  MOD_RES (6)..(6): Cou
  MOD_RES (11)..(11): Alpha-Me S5-pentenyl-alanine olefin amino acid connected by an all-carbon crosslinker comprising one double bond
  C-term NH2
LTFAHXWAQLAS

SEQ ID NO: 1482 - protein, 12 aa, Artificial Sequence
  Description of Artificial Sequence: Synthetic peptide
  N-term Ac
  MOD_RES (4)..(4): Alpha-Me R8-octenyl-alanine olefin amino acid connected by an all-carbon crosslinker comprising one double bond
  misc_feature (4)..(11): Crosslink between residues
  MOD_RES (8)..(8): Cou2
  MOD_RES (11)..(11): Alpha-Me S5-pentenyl-alanine olefin amino acid connected by an all-carbon crosslinker comprising one double bond
  C-term NH2
LTFAAYWXQLAS

SEQ ID NO: 1483 - protein, 12 aa, Artificial Sequence
  Description of Artificial Sequence: Synthetic peptide
  N-term Ac
  MOD_RES (4)..(4): Alpha-Me R8-octenyl-alanine olefin amino acid connected by an all-carbon crosslinker comprising one double bond
  misc_feature (4)..(11): Crosslink between residues
  MOD_RES (5)..(5): Cou2
  MOD_RES (11)..(11): Alpha-Me S5-pentenyl-alanine olefin amino acid connected by an all-carbon crosslinker comprising one double bond
  C-term NH2
LTFAXYWAQLAS

SEQ ID NO: 1484 - protein, 12 aa, Artificial Sequence
  Description of Artificial Sequence: Synthetic peptide
  N-term Ac
  MOD_RES (1)..(1): Cou2
  MOD_RES (4)..(4): Alpha-Me R8-octenyl-alanine olefin amino acid connected by an all-carbon crosslinker comprising one double bond
  misc_feature (4)..(11): Crosslink between residues
  MOD_RES (11)..(11): Alpha-Me S5-pentenyl-alanine olefin amino acid connected by an all-carbon crosslinker comprising one double bond
  C-term NH2
XTFAAYWAQLAS

SEQ ID NO: 1485 - protein, 12 aa, Artificial Sequence
  Description of Artificial Sequence: Synthetic peptide
  N-term Ac
  MOD_RES (4)..(4): Alpha-Me R8-octenyl-alanine olefin amino acid connected by an all-carbon crosslinker comprising one double bond
  misc_feature (4)..(11): Crosslink between residues
  MOD_RES (6)..(6): Cou2
  MOD_RES (11)..(11): Alpha-Me S5-pentenyl-alanine olefin amino acid connected by an all-carbon crosslinker comprising one double bond
  C-term NH2
LTFAAXWAQLAS

SEQ ID NO: 1486 - protein, 12 aa, Artificial Sequence
  Description of Artificial Sequence: Synthetic peptide
  N-term Dmaac
  MOD_RES (4)..(4): Alpha-Me R8-octenyl-alanine olefin amino acid connected by an all-carbon crosslinker comprising one double bond
  misc_feature (4)..(11): Crosslink between residues
  MOD_RES (11)..(11): Alpha-Me S5-pentenyl-alanine olefin amino acid connected by an all-carbon crosslinker comprising one double bond
  C-term NH2
LTFAAYWAQLAS

SEQ ID NO: 1487 - protein, 12 aa, Artificial Sequence
  Description of Artificial Sequence: Synthetic peptide
  N-term Hexac
  MOD_RES (4)..(4): Alpha-Me R8-octenyl-alanine olefin amino acid connected by an all-carbon crosslinker comprising one double bond
  misc_feature (4)..(11): Crosslink between residues
  MOD_RES (11)..(11): Alpha-Me S5-pentenyl-alanine olefin amino acid connected by an all-carbon crosslinker comprising one double bond
  C-term NH2
LTFAAYWAQLAS

SEQ ID NO: 1488 - protein, 12 aa, Artificial Sequence
  Description of Artificial Sequence: Synthetic peptide
  N-term Napac
  MOD_RES (4)..(4): Alpha-Me R8-octenyl-alanine olefin amino acid connected by an all-carbon crosslinker comprising one double bond
  misc_feature (4)..(11): Crosslink between residues
  MOD_RES (11)..(11): Alpha-Me S5-pentenyl-alanine olefin amino acid connected by an all-carbon crosslinker comprising one double bond
  C-term NH2
LTFAAYWAQLAS

SEQ ID NO: 1489 - protein, 12 aa, Artificial Sequence
  Description of Artificial Sequence: Synthetic peptide
  N-term Pam
  MOD_RES (4)..(4): Alpha-Me R8-octenyl-alanine olefin amino acid connected by an all-carbon crosslinker comprising one double bond
  misc_feature (4)..(11): Crosslink between residues
  MOD_RES (11)..(11): Alpha-Me S5-pentenyl-alanine olefin amino acid connected by an all-carbon crosslinker comprising one double bond
  C-term NH2
LTFAAYWAQLAS

SEQ ID NO: 1490 - protein, 12 aa, Artificial Sequence
  Description of Artificial Sequence: Synthetic peptide
  N-term Ac
  MOD_RES (3)..(3): 2-Naphthalanine
  MOD_RES (4)..(4): Alpha-Me R8-octenyl-alanine olefin amino acid connected by an all-carbon crosslinker comprising one double bond
  misc_feature (4)..(11): Crosslink between residues
  MOD_RES (11)..(11): Alpha-Me S5-pentenyl-alanine olefin amino acid connected by an all-carbon crosslinker comprising one double bond
  C-term NH2
LTAAHYAAQLAS

SEQ ID NO: 1491 - protein, 12 aa, Artificial Sequence
  Description of Artificial Sequence: Synthetic peptide
  N-term Ac
  MOD_RES (3)..(3): 2-Naphthalanine
  MOD_RES (4)..(4): Alpha-Me R8-octenyl-alanine olefin amino acid that is not connected by a crosslinker
  MOD_RES (11)..(11): Alpha-Me S5-pentenyl-alanine olefin amino acid that is not connected by a crosslinker
  C-term NH2
LTAAHYWAQLAS

SEQ ID NO: 1492 - protein, 12 aa, Artificial Sequence
  Description of Artificial Sequence: Synthetic peptide
  N-term Ac
  MOD_RES (3)..(3): 2-Naphthalanine
  MOD_RES (4)..(4): Alpha-Me R8-octenyl-alanine olefin amino acid connected by an all-carbon crosslinker comprising one double bond
  misc_feature (4)..(11): Crosslink between residues
  MOD_RES (11)..(11): Alpha-Me S5-pentenyl-alanine olefin amino acid connected by an all-carbon crosslinker comprising one double bond
  C-term NH2
LTAAHYFAQLAS

SEQ ID NO: 1493 - protein, 12 aa, Artificial Sequence
  Description of Artificial Sequence: Synthetic peptide
  N-term Ac
  MOD_RES (3)..(3): 2-Naphthalanine
  MOD_RES (4)..(4): Alpha-Me R8-octenyl-alanine olefin amino acid connected by an all-carbon crosslinker comprising one double bond
  misc_feature (4)..(11): Crosslink between residues
  MOD_RES (11)..(11): Alpha-Me S5-pentenyl-alanine olefin amino acid connected by an all-carbon crosslinker comprising one double bond
  C-term NH2
LTAAHWAAQLAS

SEQ ID NO: 1494 - protein, 12 aa, Artificial Sequence
  Description of Artificial Sequence: Synthetic peptide
  N-term Ac
  MOD_RES (3)..(3): 2-Naphthalanine
  MOD_RES (4)..(4): Alpha-Me R8-octenyl-alanine olefin amino acid connected by an all-carbon crosslinker comprising one double bond
  misc_feature (4)..(11): Crosslink between residues
  MOD_RES (11)..(11): Alpha-Me S5-pentenyl-alanine olefin amino acid connected by an all-carbon crosslinker comprising one double bond
  C-term NH2
LTAAHYAWQLAS

SEQ ID NO: 1495 - protein, 12 aa, Artificial Sequence
  Description of Artificial Sequence: Synthetic peptide
  N-term Ac
  MOD_RES (3)..(3): 2-Naphthalanine
  MOD_RES (4)..(4): Alpha-Me R8-octenyl-alanine olefin amino acid connected by an all-carbon crosslinker comprising one double bond
  misc_feature (4)..(11): Crosslink between residues
  MOD_RES (11)..(11): Alpha-Me S5-pentenyl-alanine olefin amino acid connected by an all-carbon crosslinker comprising one double bond
  C-term NH2
LTAAHYAAQWAS

SEQ ID NO: 1496 - protein, 12 aa, Artificial Sequence
  Description of Artificial Sequence: Synthetic peptide
  N-term Ac
  MOD_RES (4)..(4): Alpha-Me R8-octenyl-alanine olefin amino acid connected by an all-carbon crosslinker comprising one double bond
  misc_feature (4)..(11): Crosslink between residues
  MOD_RES (11)..(11): Alpha-Me S5-pentenyl-alanine olefin amino acid connected by an all-carbon crosslinker comprising one double bond
  C-term NH2
LTWAHYWAQLAS

SEQ ID NO: 1497 - protein, 12 aa, Artificial Sequence
  Description of Artificial Sequence: Synthetic peptide
  N-term Ac
  MOD_RES (3)..(3): 1-Naphthalanine
  MOD_RES (4)..(4): Alpha-Me R8-octenyl-alanine olefin amino acid connected by an all-carbon crosslinker comprising one double bond
  misc_feature (4)..(11): Crosslink between residues
  MOD_RES (11)..(11): Alpha-Me S5-pentenyl-alanine olefin amino acid connected by an all-carbon crosslinker comprising one double bond
  C-term NH2
LTAAHYWAQLAS

SEQ ID NO: 1498 - protein, 12 aa, Artificial Sequence
  Description of Artificial Sequence: Synthetic peptide
  N-term Ac
  MOD_RES (1)..(12): D-amino acid
  C-term NH2
TAWYANFEKLLR

SEQ ID NO: 1499 - protein, 12 aa, Artificial Sequence
  Description of Artificial Sequence: Synthetic peptide
  N-term Ac
  MOD_RES (1)..(6): D-amino acid
  MOD_RES (7)..(7): D-Phe-4CF3
  MOD_RES (8)..(12): D-amino acid
  C-term NH2
TAWYANFEKLLR

SEQ ID NO: 1500 - protein, 17 aa, Artificial Sequence
  Description of Artificial Sequence: Synthetic peptide
  N-term Ac
  MOD_RES (4)..(4): Alpha-Me R6-hexynyl-alanine alkynyl amino acids, crosslink via a dialkyne bond with a second alkynyl amino acid
  misc_feature (4)..(11): Crosslink between residues
  MOD_RES (11)..(11): Alpha-Me S6-hexynyl-alanine alkynyl amino acids, crosslink via a dialkyne bond with a second alkynyl amino acid
  MOD_RES (17)..(17): D-amino acid
  C-term NH2
  see specification as filed for detailed description of substitutions and preferred embodiments
LTFAEYWAQLAAAAAAA

What is claimed is:

1. A method of treating a condition in a subject in need thereof, the method comprising administering to the subject a therapeutically-effective amount of a peptidomimetic macrocycle and at least one pharmaceutically-active agent, wherein the peptidomimetic macrocycle and the at least one pharmaceutically-active agent are administered with a time separation of more than 61 minutes.

2. The method of claim 1, wherein the peptidomimetic macrocycle is of the formula: [chemical structure]
or pharmaceutically acceptable salt thereof, wherein:
each A, C, D, and E is independently an amino acid;
each B is independently an amino acid, [chemical structure]
[—NH-L₃-CO—], [—NH-L₃-SO₂—], or [—NH-L₃-];
each R₁ and R₂ is independently hydrogen, alkyl, alkenyl, alkynyl, arylalkyl, cycloalkyl, cycloalkylalkyl, heteroalkyl, or heterocycloalkyl, unsubstituted or substituted with halo-; or
forms a macrocycle-forming linker L′ connected to the alpha position of one of said D or E amino acids;
each R₃ is independently hydrogen, alkyl, alkenyl, alkynyl, arylalkyl, heteroalkyl, cycloalkyl, heterocycloalkyl, cycloalkylalkyl, aryl, or heteroaryl, optionally substituted with R₅;
each L and L′ is independently a macrocycle-forming linker of the formula -L₁-L₂-;
each L₁, L₂, and L₃ is independently alkylene, alkenylene, alkynylene, heteroalkylene, cycloalkylene, heterocycloalkylene, arylene, heteroarylene, or [—R₄—K—R₄-]ₙ, each being optionally substituted with R₅;
each R₄ is independently alkylene, alkenylene, alkynylene, heteroalkylene, cycloalkylene, heterocycloalkylene, arylene, or heteroarylene;
each K is independently O, S, SO, SO₂, CO, CO₂, or CONR₃;
each R₅ is independently halogen, alkyl, —OR₆, —N(R₆)₂, —SR₆, —SOR₆, —SO₂R₆, —CO₂R₆, a fluorescent moiety, a radioisotope or a therapeutic agent;
each R₆ is independently hydrogen, alkyl, alkenyl, alkynyl, arylalkyl, cycloalkylalkyl, heterocycloalkyl, a fluorescent moiety, a radioisotope or a therapeutic agent;
each R₇ is independently hydrogen, alkyl, alkenyl, alkynyl, arylalkyl, cycloalkyl, heteroalkyl, cycloalkylalkyl, heterocycloalkyl, aryl, or heteroaryl, optionally substituted with R₅, or part of a cyclic structure with a D residue;
each R₈ is independently hydrogen, alkyl, alkenyl, alkynyl, arylalkyl, cycloalkyl, heteroalkyl, cycloalkylalkyl, heterocycloalkyl, aryl, or heteroaryl, optionally substituted with R₅, or part of a cyclic structure with an E residue;
each v is independently an integer from 1-1000;
each w is independently an integer from 1-1000;
u is 1, 2, 3, 4, 5, 6, 7, 8, 9, or 10;
each x, y and z is independently 1, 2, 3, 4, 5, 6, 7, 8, 9, or 10; and
each n is independently 1, 2, 3, 4, or 5.

3. The method of claim 2, wherein v is 3-10.

4. The method of claim 3, wherein v is 3.

5. The method of claim 2, wherein w is 3-10.

6. The method of claim 5, wherein w is 6.

7. The method of claim 2, wherein x+y+z=6.

8. The method of claim 2, wherein each L₁ and L₂ is independently alkylene, alkenylene, alkynylene, heteroalkylene, cycloalkylene, heterocycloalkylene, arylene, or heteroarylene.

9. The method of claim 8, wherein each L₁ and L₂ is independently alkylene or alkenylene.

10. The method of claim 2, wherein each R₁ and R₂ is independently hydrogen, alkyl, alkenyl, alkynyl, arylalkyl, cycloalkyl, cycloalkylalkyl, heteroalkyl, or heterocycloalkyl, unsubstituted or substituted with halo-.

11. The method of claim 10, wherein each R₁ and R₂ is independently hydrogen.

12. The method of claim 10, wherein each R₁ and R₂ is independently alkyl.

13. The method of claim 10, wherein each R₁ and R₂ is independently methyl.

14. The method of claim 2, wherein u is 1.

15. The method of claim 2, wherein each E is Ser or Ala, or an analogue thereof.

16. The method of claim 1, wherein the peptidomimetic macrocycle comprises an amino acid sequence that is at least 60% identical to an amino acid sequence listed in Table 1, Table 1a, Table 1b, Table 1c, Table 2a, or Table 2b.

17. The method of claim 16, wherein the peptidomimetic macrocycle comprises an amino acid sequence that is at least 70% identical to an amino acid sequence listed in Table 1, Table 1a, Table 1b, Table 1c, Table 2a, or Table 2b.

18. The method of claim 17, wherein the peptidomimetic macrocycle comprises an amino acid sequence that is at least 80% identical to an amino acid sequence listed in Table 1, Table 1a, Table 1b, Table 1c, Table 2a, or Table 2b.

19. The method of claim 16, wherein the peptidomimetic macrocycle is at least 60% identical to SP-153, SP-303, SP-331, or SP-671.

20. The method of claim 1, wherein the condition is cancer.

21. The method of claim 20, wherein the cancer is lymphoma.

22. The method of claim 20, wherein the cancer is breast cancer.

23. The method of claim 20, wherein the cancer is skin cancer.

24. The method of claim 20, wherein the cancer is leukemia.

25. The method of claim 20, wherein the cancer is melanoma.

26. The method of claim 20, wherein the cancer is bone cancer.

27. The method of claim 1, wherein the at least one pharmaceutically-active agent, pharmaceutically-acceptable salt, or conjugate thereof is a cyclin-dependent kinase (CDK) inhibitor.

28. The method of claim 27, wherein the CDK inhibitor is palbociclib.

29. The method of claim 27, wherein the CDK inhibitor is abemaciclib.

30. The method of claim 27, wherein the CDK inhibitor is ribociclib.

31. The method of claim 1, wherein the at least one pharmaceutically-active agent is a mitogen-activated protein kinase (MEK) inhibitor.

32. The method of claim 1, wherein the at least one pharmaceutically-active agent is a microtubule inhibitor.

33. The method of claim 32, wherein the microtubule inhibitor is eribulin.

34. The method of claim 32, wherein the microtubule inhibitor is paclitaxel.

35. The method of claim 34, wherein the microtubule inhibitor is nanoparticle albumin-bound paclitaxel.
